(19) United States
(12) Patent Application Publication
(10) Pub. No.: US 2023/0151095 A1
(43) Pub. Date: May 18, 2023

(54) BISPECIFIC ANTIBODIES THAT BIND TO B7H3 AND NKG2D

(71) Applicant: Xencor, Inc., Monrovia, CA (US)

(72) Inventors: Katrina Bykova, Seattle, WA (US); Matthew Faber, Glendora, CA (US); Matthew Bernett, Monrovia, CA (US); Tian Zhang, Chino Hills, CA (US); Erik Pong, San Gabriel, CA (US); Kendra Avery, Hawthorne, CA (US); John Desjarlais, Pasadena, CA (US)

(21) Appl. No.: 18/053,325

(22) Filed: Nov. 7, 2022

Related U.S. Application Data
(60) Provisional application No. 63/278,999, filed on Nov. 12, 2021.

(51) Int. Cl. C07K 16/28; A61P 35/00

(52) U.S. Cl. CPC C07K 16/2803; A61P 35/00; C07K 2317/622; C07K 2317/52; C07K 2317/565

(57) ABSTRACT

Provided herein are bispecific antibodies that bind to B7H3 and NKG2D (e.g., antibodies having Fab-scFv-Fc, Fab₂-scFv-Fc, mAb-scFv and stackFab₂-scFv-Fc formats) or antigen binding fragments thereof. Also provided herein are polynucleotide sequences encoding a chain and/or a CDR of a bispecific antibody of the disclosure; and vectors and cells comprising such polynucleotide sequences. Also provided herein are methods of treating cancer in a subject with a bispecific antibody of the disclosure.

### CROSS REFERENCE TO RELATED APPLICATIONS

[0001] This application claims the benefit of U.S. Provisional Patent Application No. 63/278,999, filed Nov. 12, 2021, which is hereby incorporated by reference in its entirety.

### SEQUENCE LISTING

[0002] The instant application contains a Sequence Listing which has been submitted electronically in XML format and is hereby incorporated by reference in its entirety. The XML copy, created on Nov. 7, 2022 is named 51096_4002_US.xml and is 3,532,485 bytes in size.

### BACKGROUND

[0003] Antibody-based therapeutics have been used successfully to treat a variety of diseases, including cancer. An increasingly prevalent avenue being explored is the engineering of single immunoglobulin molecules that co-engage two different antigens. Such alternate antibody formats that engage two different antigens are often referred to as bispecific antibodies. Because the considerable diversity of the antibody variable region (Fv) makes it possible to produce an Fv that recognizes virtually any molecule, the typical approach to bispecific antibody generation is the introduction of new variable regions into the antibody.

[0004] A number of alternate antibody formats have been explored for bispecific targeting (Chames & Baty, 2009, mAbs 1[6]:1-9; Holliger & Hudson, 2005, Nature Biotechnology 23[9]:1126-1136; and Kontermann, 2012 MAbs 4(2):182, all of which are expressly incorporated herein by reference). Initially, bispecific antibodies were made by fusing two cell lines that each produced a single monoclonal antibody (Milstein et al., 1983, Nature 305:537-540). Although the resulting hybrid hybridoma or quadroma did produce bispecific antibodies, they were only a minor population, and extensive purification was required to isolate the desired antibody. An engineering solution to this was the use of antibody fragments to make bispecifics. Because such fragments lack the complex quaternary structure of a full-length antibody, variable light and heavy chains can be linked in single genetic constructs. Antibody fragments of many different forms have been generated, including diabodies, single chain diabodies, tandem scFv's, and Fab₂ bispecifics (Chames & Baty, 2009, mAbs 1[6]:1-9; Holliger & Hudson, 2005, Nature Biotechnology 23[9]:1126-1136; expressly incorporated herein by reference). While these formats can be expressed at high levels in bacteria and may have favorable penetration benefits due to their small size, they clear rapidly in vivo and can present manufacturing obstacles related to their production and stability. A principal cause of these drawbacks is that antibody fragments typically lack the constant region of the antibody with its associated functional properties, including larger size, high stability, and binding to various Fc receptors and ligands that maintain long half-life in serum (i.e., the neonatal Fc receptor FcRn) or serve as binding sites for purification (i.e., protein A and protein G).

[0005] More recent work has attempted to address the shortcomings of fragment-based bispecifics by engineering dual binding into full length antibody-like formats (Wu et al., 2007, Nature Biotechnology 25[11]:1290-1297; U.S. Ser. No. 12/477,711; Michaelson et al., 2009, mAbs 1[2]:128-141; PCT/US2008/074693; Zuo et al., 2000, Protein Engineering 13[5]:361-367; U.S. Ser. No. 09/865,198; Shen et al., 2006, J Biol Chem 281[16]:10706-10714; Lu et al., 2005, J Biol Chem 280[20]:19665-19672; PCT/US2005/025472; and Kontermann, 2012 MAbs 4(2):182, all of which are expressly incorporated herein by reference). These formats overcome some of the obstacles of the antibody fragment bispecifics, principally because they contain an Fc region. One significant drawback of these formats is that, because they build new antigen binding sites on top of the homodimeric constant chains, binding to the new antigen is always bivalent.

[0006] For many antigens that are attractive as co-targets in a therapeutic bispecific format, the desired binding is monovalent rather than bivalent. For many immune receptors, cellular activation is accomplished by cross-linking of a monovalent binding interaction. The mechanism of cross-linking is typically mediated by antibody/antigen immune complexes, or via effector cell to target cell engagement. For example, the low affinity Fc gamma receptors (FcγRs) such as FcγRIIa, FcγRIIb, and FcγRIIIa bind monovalently to the antibody Fc region. Monovalent binding does not activate cells expressing these FcγRs; however, upon immune complexation or cell-to-cell contact, receptors are cross-linked and clustered on the cell surface, leading to activation. For receptors responsible for mediating cellular killing, for example FcγRIIIa on natural killer (NK) cells, receptor cross-linking and cellular activation occurs when the effector cell engages the target cell in a highly avid format (Bowles & Weiner, 2005, J Immunol Methods 304:88-99, expressly incorporated by reference). Similarly, on B cells the inhibitory receptor FcγRIIb downregulates B cell activation only when it engages into an immune complex with the cell surface B-cell receptor (BCR), a mechanism that is mediated by immune complexation of soluble IgG's with the same antigen that is recognized by the BCR (Heyman 2003, Immunol Lett 88[2]:157-161; Smith and Clatworthy, 2010, Nature Reviews Immunology 10:328-343; expressly incorporated by reference).

[0007] T cell-mediated immune response plays an extremely important role in anti-tumor processes of an organism. However, the activation and proliferation of T cells requires not only an antigen signal recognized by TCR, but also a second signal provided by co-stimulatory molecules. The molecules of the B7 family belong to the co-stimulatory molecule immunoglobulin superfamily. More and more studies have shown that molecules of this family play an important regulatory role in the normal immune function and pathological state in an organism.

[0008] B7H3 is a member of B7 family and is a type I transmembrane protein, which contains a signal peptide at the amino terminus, an extracellular immunoglobulin-like variable region (IgV) and constant region (IgC), a transmembrane region, and a cytoplasmic tail region having 45 amino acids (Tissue Antigens. 2007 August; 70(2): 96-104). B7H3 has two kinds of splicing variants, B7H3a and B7H3b. The extracellular domain of B7H3a consists of two immunoglobulin domains of IgV-IgC (also known as 2IgB7H3), and the extracellular domain of B7H3b consists of four immunoglobulin domains of IgV-IgC-IgV-IgC (also known as 4IgB7H3).

[0009] B7H3 protein is not expressed or is poorly expressed in normal tissues and cells, but highly expressed in various tumor tissues and is closely correlated with tumor progression, patient survival and prognosis. It has been clinically reported that B7H3 is over-expressed in many types of cancers, especially in non-small cell lung cancer, renal cancer, urinary tract epithelial cancer, colorectal cancer, prostate cancer, glioblastoma multiforme, ovarian cancer and pancreas cancer (Lung Cancer. 2009 November; 66(2): 245-249; Clin Cancer Res. 2008 Aug. 15; 14(16): 5150-5157). In addition, it has also been reported in the literature that, in prostate cancer, the expression level of B7H3 is positively correlated with clinical pathological malignancy (such as tumor volume, extra-prostatic invasion or Gleason score), and is also associated with cancer progression (Cancer Res. 2007 Aug. 15; 67(16):7893-7900). Similarly, in glioblastoma multiforme, the expression of B7H3 is inversely associated with event-free survival, and in pancreatic cancer, the expression of B7H3 is associated with lymph node metastasis and pathological progression. Therefore, B7H3 is considered as a new tumor marker and potential therapeutic target.

[0010] Natural killer group 2 member D (NKG2D) is an activating receptor present on the surface of natural killer (NK) cells, some NK T cells, CD8+ cytotoxic T cells, γδ T cells, and CD4+ T cells, under certain conditions. (Champsaur M, Lanier L L. Immunol Rev 2010; 235:267-85; Jamieson A M, Diefenbach A, McMahon C W, et al. Immunity 2002; 17:19-29).

[0011] The present disclosure is directed to bispecific B7H3 and NKG2D antibodies and the use of such antibodies for use in therapy (e.g., cancer therapy).

### SUMMARY

[0012] In one aspect, provided herein is a heterodimeric antibody comprising: a) a first monomer comprising: i) an anti-NKG2D scFv comprising a first variable heavy VH1 domain, an scFv linker and a first variable light VL1 domain; and ii) a first Fc domain, wherein the scFv is covalently attached to the N-terminus of the first Fc domain using a domain linker; b) a second monomer comprising a VH2-CH1-hinge-CH2-CH3 monomer, wherein VH2 is a second variable heavy domain and CH2-CH3 is a second Fc domain; and c) a light chain comprising a second variable light VL2 domain, wherein the second variable heavy VH2 domain and the second variable light VL2 domain form an B7H3 antigen binding domain, and wherein the first Fc domain and/or the second Fc domain comprise an amino acid substitution(s) selected from the group consisting of S239D, I332E, S239D/I332E, G236A, S239E, I332D, G236A/I332E, S239D/I332E/A330L, I332E/A330L, F243L, and S298A, wherein numbering is according to EU numbering and have enhanced FcγRIIIA (CD16a) binding compared to first and second Fc domains lacking such substitution(s).

[0013] In some embodiments, the B7H3 antigen binding domain comprises a set of vhCDR1-3 and vlCDR1-3 from a variable heavy domain and variable light domain pair selected from the group consisting of SEQ ID NOS: 27, 28, and 29 for vhCDR1-3 and SEQ ID NOS: 30, 31, and 32 for vlCDR1-3 of 38E2[B7H3]_H2_L1.1; SEQ ID NOS: 243, 244, and 245 for vhCDR1-3 and SEQ ID NOS: 247, 248, and 249 for vlCDR1-3 of 6A1[B7H3]_H1_L1; SEQ ID NOS: 143, 144, and 22 for vhCDR1-3 and SEQ ID NOS: 23, 24, and 26 for vlCDR1-3 of 2E43.189[B7H3]_H1_L1; and SEQ ID NOS: 20, 21, and 22 for vhCDR1-3 and SEQ ID NOS: 23, 24, and 26 for vlCDR1-3 of 2E43.189[B7H3]_H1.22_L1, as depicted in FIGS. 13 and 14.

[0014] In some embodiments, the B7H3 antigen binding domain comprises a variable heavy domain and variable light domain pair selected from the group consisting of SEQ ID NOS: 140 and 141 of 38E2[B7H3]_H2_L1.1; SEQ ID NOS: 242 and 246 of 6A1[B7H3]_H1L1; SEQ ID NOS: 142 and 51 of 2E4A3.189[B7H3] H1_L1; and SEQ ID NOS: 145 and 51 of 2E4A3.189[B7H3] H1.22_L1, as depicted in FIGS. 13 and 14.

[0015] In some embodiments, the anti-NKG2D scFv comprises a set of vhCDR1-3 and the vlCDR1-3 from a variable heavy domain and variable light domain pair selected from the group consisting of SEQ ID NOS: 2604-2606 for vhCDR1-3 and SEQ ID NOS: 2608-2610 for vlCDR1-3 of mAb-C[NKG2D]; SEQ ID NOS: 2612-2614 for vhCDR1-3 and SEQ ID NOS: 2616-2618 for vlCDR1-3 of mAb-D[NKG2D]; SEQ ID NOS: 17-18 and 1256 for vhCDR1-3 of 1D7B4[NKG2D]_H1.23 and SEQ ID NOS: 23, 24, and 26 for vlCDR1-3 of 1D7B4[NKG2D]_L1; SEQ ID NOS: 17-18 and 1272 for vhCDR1-3 of 1D7B4[NKG2D]_H1.31 and SEQ ID NOS: 23, 24, and 26 for vlCDR1-3 of 1D7B4[NKG2D]_L1; SEQ ID NOS: 17-19 for vhCDR1-3 and SEQ ID NOS: 23, 24, and 26 for vlCDR1-3 of 1D7B4[NKG2D]_H1_L1; SEQ ID NOS: 33-35 for vhCDR1-3 and SEQ ID NOS: 23, 24, and 26 for vlCDR1-3 of 1D2B4[NKG2D]_H1_L1; SEQ ID NOS: 1212 and 18-19 for vhCDR1-3 of 1D7B4[NKG2D]_H1.1 and SEQ ID NOS: 23, 24, and 26 for vlCDR1-3; SEQ ID NOS: 1214 and 18-19 for vhCDR1-3 of 1D7B4[NKG2D]_H1.2 and SEQ ID NOS: 23, 24, and 26 for vlCDR1-3; SEQ ID NOS: 1216 and 18-19 for vhCDR1-3 of 1D7B4[NKG2D]_H1.3 and SEQ ID NOS: 23, 24, and 26 for vlCDR1-3; SEQ ID NOS: 1218 and 18-19 for vhCDR1-3 of 1D7B4[NKG2D]_H1.4 and SEQ ID NOS: 23, 24, and 26 for vlCDR1-3; SEQ ID NOS: 1220 and 18-19 for vhCDR1-3 of 1D7B4[NKG2D]_H1.5 and SEQ ID NOS: 23, 24, and 26 for vlCDR1-3; SEQ ID NOS: 1222 and 18-19 for vhCDR1-3 of 1D7B4[NKG2D]_H1.6 and SEQ ID NOS: 23, 24, and 26 for vlCDR1-3; SEQ ID NOS: 1224 and 18-19 for vhCDR1-3 of 1D7B4[NKG2D]_H1.7 and SEQ ID NOS: 23, 24, and 26 for vlCDR1-3; SEQ ID NOS: 1226 and 18-19 for vhCDR1-3 of 1D7B4[NKG2D]_H1.8 and SEQ ID NOS: 23, 24, and 26 for vlCDR1-3; SEQ ID NOS: 17-18 and 1228 for vhCDR1-3 of 1D7B4[NKG2D]_H1.9 and SEQ ID NOS: 23, 24, and 26 for vlCDR1-3; SEQ ID NOS: 17, 18 and 1230 for vhCDR1-3 of 1D7B4[NKG2D]_H1.10 and SEQ ID NOS: 23, 24, and 26 for vlCDR1-3; SEQ ID NOS: 17-18 and 1232 for vhCDR1-3 of 1D7B4[NKG2D]_H1.11 and SEQ ID NOS: 23, 24, and 26 for vlCDR1-3; SEQ ID NOS: 12-18 and 1234 for vhCDR1-3 of 1D7B4[NKG2D]_H1.12 and SEQ ID NOS: 23, 24, and 26 for vlCDR1-3; SEQ ID NOS: 12-18 and 1236 for vhCDR1-3 of 1D7B4[NKG2D]_H1.13 and SEQ ID NOS: 23, 24, and 26 for vlCDR1-3; SEQ ID NOS: 17-18 and 1238 for vhCDR1-3 of 1D7B4[NKG2D]_H1.14 and SEQ ID NOS: 23, 24, and 26 for vlCDR1-3; SEQ ID NOS: 17-18 and 1240 for vhCDR1-3 of 1D7B4[NKG2D]_H1.15 and SEQ ID NOS: 23, 24, and 26 for vlCDR1-3; SEQ ID NOS: 17-18 and 1242 for vhCDR1-3 of 1D7B4[NKG2D]_H1.16 and SEQ ID NOS: 23, 24, and 26 for vlCDR1-3; SEQ ID NOS: 17-18 and 1244 for vhCDR1-3 of 1D7B4[NKG2D]_H1.17 and SEQ ID NOS: 23, 24, and 26 for vlCDR1-3; SEQ ID NOS: 17-18 and 1246 for vhCDR1-3 of 1D7B4[NKG2D]_H1.18 and SEQ ID NOS: 23, 24, and 26 for vlCDR1-3; SEQ ID NOS: 17-18 and 1248 for vhCDR1-3 of 1D7B4[NKG2D]_H1.19 and SEQ ID NOS: 23, 24, and 26 for vlCDR1-3; SEQ ID NOS: 17-18 and 1250 for vhCDR1-3 of 1D7B4[NKG2D]_H1.20 and SEQ ID NOS: 23, 24, and 26 for vlCDR1-3; SEQ ID NOS: 17-18 and 1252 for vhCDR1-3 of 1D7B4[NKG2D]_H1.21 and SEQ ID NOS: 23, 24, and 26 for vlCDR1-3; SEQ ID NOS: 17-18 and 1254 for vhCDR1-3 of 1D7B4[NKG2D]_H1.22 and SEQ ID NOS: 23, 24, and 26 for vlCDR1-3; SEQ ID NOS: 17-18 and 1258 for vhCDR1-3 of 1D7B4[NKG2D]_H1.24 and SEQ ID NOS: 23, 24, and 26 for vlCDR1-3; SEQ ID NOS: 17-18 and 1260 for vhCDR1-3 of 1D7B4[NKG2D]_H1.25 and SEQ ID NOS: 23, 24, and 26 for vlCDR1-3; SEQ ID NOS: 17-18 and 1262 for vhCDR1-3 of 1D7B4[NKG2D]_H1.26 and SEQ ID NOS: 23, 24, and 26 for vlCDR1-3; SEQ ID NOS: 17-18 and 1264 for vhCDR1-3 of 1D7B4[NKG2D]_H1.27 and SEQ ID NOS: 23, 24, and 26 for vlCDR1-3; SEQ ID NOS: 17-18 and 1266 for vhCDR1-3 of 1D7B4[NKG2D]_H1.28 and SEQ ID NOS: 23, 24, and 26 for vlCDR1-3; SEQ ID NOS: 17-18 and 1268 for vhCDR1-3 of 1D7B4[NKG2D]_H1.29 and SEQ ID NOS: 23, 24, and 26 for vlCDR1-3; SEQ ID NOS: 17-18 and 1270 for vhCDR1-3 of 1D7B4[NKG2D]_H1.30 and SEQ ID NOS: 23, 24, and 26 for vlCDR1-3; SEQ ID NOS: 17-18 and 1274 for vhCDR1-3 of 1D7B4[NKG2D]_H1.32 and SEQ ID NOS: 23, 24, and 26 for vlCDR1-3; SEQ ID NOS: 17-18 and 1276 for vhCDR1-3 of 1D7B4[NKG2D]_H1.33 and SEQ ID NOS: 23, 24, and 26 for vlCDR1-3; SEQ ID NOS: 17-18 and 1278 for vhCDR1-3 of 1D7B4[NKG2D]_H1.34 and SEQ ID NOS: 23, 24, and 26 for vlCDR1-3; SEQ ID NOS: 17-18 and 1280 for vhCDR1-3 of 1D7B4[NKG2D]_H1.35 and SEQ ID NOS: 23, 24, and 26 for vlCDR1-3; SEQ ID NOS: 17-18 and 1282 for vhCDR1-3 of 1D7B4[NKG2D]_H1.36 and SEQ ID NOS: 23, 24, and 26 for vlCDR1-3; SEQ ID NOS: 17-18 and 1284 for vhCDR1-3 of 1D7B4[NKG2D]_H1.37 and SEQ ID NOS: 23, 24, and 26 for vlCDR1-3; SEQ ID NOS: 17-18 and 1286 for vhCDR1-3 of 1D7B4[NKG2D]_H1.38 and SEQ ID NOS: 23, 24, and 26 for vlCDR1-3; SEQ ID NOS: 17-18 and 1288 for vhCDR1-3 of 1D7B4[NKG2D]_H1.39 and SEQ ID NOS: 23, 24, and 26 for vlCDR1-3; SEQ ID NOS: 17-18 and 1290 for vhCDR1-3 of 1D7B4[NKG2D]_H1.40 and SEQ ID NOS: 23, 24, and 26 for vlCDR1-3; SEQ ID NOS: 17-18 and 1292 for vhCDR1-3 of 1D7B4[NKG2D]_H1.41 and SEQ ID NOS: 23, 24, and 26 for vlCDR1-3; SEQ ID NOS: 17-18 and 1294 for vhCDR1-3 of 1D7B4[NKG2D]_H1.42 and SEQ ID NOS: 23, 24, and 26 for vlCDR1-3; SEQ ID NOS: 17-18 and 1296 for vhCDR1-3 of 1D7B4[NKG2D]_H1.43 and SEQ ID NOS: 23, 24, and 26 for vlCDR1-3; SEQ ID NOS: 17-18 and 1298 for vhCDR1-3 of 1D7B4[NKG2D]_H1.44 and SEQ ID NOS: 23, 24, and 26 for vlCDR1-3; SEQ ID NOS: 17-18 and 1300 for vhCDR1-3 of 1D7B4[NKG2D]_H1.45 and SEQ ID NOS: 23, 24, and 26 for vlCDR1-3; SEQ ID NOS: 17-18 and 1302 for vhCDR1-3 of 1D7B4[NKG2D]_H1.46 and SEQ ID NOS: 23, 24, and 26 for vlCDR1-3; SEQ ID NOS17-18 and 1304 for vhCDR1-3 of 1D7B4[NKG2D]_H1.47 and SEQ ID NOS: 23, 24, and 26 for vlCDR1-3; and SEQ ID NOS: 17-18 and 1306 for vhCDR1-3 of 1D7B4[NKG2D]_H1.48 and SEQ ID NOS: 23, 24, and 26 for vlCDR1-3, as depicted in FIGS. 23 and 58.

[0016] In some embodiments, the anti-NKG2D scFv comprises a variable heavy domain and variable light domain pair selected from the group consisting of SEQ ID NOS: 2603 and 2607 of mAb-C[NKG2D]; SEQ ID NOS: 2611 and 2615 of mAb-D[NKG2D]; SEQ ID NOS: 1255 and 51 of 1D7B4[NKG2D]_H1.23_L1; SEQ ID NOS: 1271 and 51 of 1D7B4[NKG2D]_H1.31_L1; SEQ ID NOS: 50 and 51 of 1D7B4[NKG2D]_H1_L1; SEQ ID NOS: 52 and 51 of 1D2B4[NKG2D]; SEQ ID NOS: 1211 and 51 of 1D7B4[NKG2D]_H1.1_L1; SEQ ID NOS: 1213 and 51 of 1D7B4[NKG2D]_H1.2_L1; SEQ ID NOS: 1215 and 51 of 1D7B4[NKG2D]_H1.3_L1; SEQ ID NOS: 1217 and 51 of 1D7B4[NKG2D]_H1.4_L1; SEQ ID NOS: 1219 and 51 of 1D7B4[NKG2D]_H1.5_L1; SEQ ID NOS: 1221 and 51 of 1D7B4[NKG2D]_H1.6_L1; SEQ ID NOS: 1223 and 51 of 1D7B4[NKG2D]_H1.7_L1; SEQ ID NOS: 1225 and 51 of 1D7B4[NKG2D]_H1.8_L1; SEQ ID NOS: 1227 and 51 of 1D7B4[NKG2D]_H1.9_L1; SEQ ID NOS: 1229 and 51 of 1D7B4[NKG2D]_H1.10_L1; SEQ ID NOS: 1231 and 51 of 1D7B4[NKG2D]_H1.11_L1; SEQ ID NOS: 1233 and 51 of 1D7B4[NKG2D]_H1.12_L1; SEQ ID NOS: 1235 and 51 of 1D7B4[NKG2D]_H1.13_L1; SEQ ID NOS: 1237 and 51 of 1D7B4[NKG2D]_H1.14_L1; SEQ ID NOS: 1239 and 51 of 1D7B4[NKG2D]_H1.15_L1; SEQ ID NOS: 1241 and 51 of 1D7B4[NKG2D]_H1.16_L1; SEQ ID NOS: 1243 and 51 of 1D7B4[NKG2D]_H1.17_L1; SEQ ID NOS: 1245 and 51 of 1D7B4[NKG2D]_H1.18_L1; SEQ ID NOS: 1247 and 51 of 1D7B4[NKG2D]_H1.19_L1; SEQ ID NOS: 1249 and 51 of 1D7B4[NKG2D]_H1.20_L1; SEQ ID NOS: 1251 and 51 of 1D7B4[NKG2D]_H1.21_L1; SEQ ID NOS: 1253 and 51 of 1D7B4[NKG2D]_H1.22_L1; SEQ ID NOS: 1257 and 51 of 1D7B4[NKG2D]_H1.24_L1; SEQ ID NOS: 1259 and 51 of 1D7B4[NKG2D]_H1.25_L1; SEQ ID NOS: 1261 and 51 of 1D7B4[NKG2D]_H1.26_L1; SEQ ID NOS: 1263 and 51 of 1D7B4[NKG2D]_H1.27_L1; SEQ ID NOS: 1265 and 51 of 1D7B4[NKG2D]_H1.28_L1; SEQ ID NOS: 1267 and 51 of 1D7B4[NKG2D]_H1.29_L1; SEQ ID NOS: 1269 and 51 of 1D7B4[NKG2D]_H1.30_L1; SEQ ID NOS: 1273 and 51 of 1D7B4[NKG2D]_H1.32_L1; SEQ ID NOS: 1275 and 51 of 1D7B4[NKG2D]_H1.33_L1; SEQ ID NOS: 1277 and 51 of 1D7B4[NKG2D]_H1.34_L1; SEQ ID NOS: 1279 and 51 of 1D7B4[NKG2D]_H1.35_L1; SEQ ID NOS: 1281 and 51 of 1D7B4[NKG2D]_H1.36_L1; SEQ ID NOS: 1283 and 51 of 1D7B4[NKG2D]_H1.37_L1; SEQ ID NOS: 1285 and 51 of 1D7B4[NKG2D]_H1.38_L1; SEQ ID NOS: 1287 and 51 of 1D7B4[NKG2D]_H1.39_L1; SEQ ID NOS: 1289 and 51 of 1D7B4[NKG2D]_H1.40_L1; SEQ ID NOS: 1291 and 51 of 1D7B4[NKG2D]_H1.41_L1; SEQ ID NOS: 1293 and 51 of 1D7B4[NKG2D]_H1.42_L1; SEQ ID NOS: 1295 and 51 of 1D7B4[NKG2D]_H1.43_L1; SEQ ID NOS: 1297 and 51 of 1D7B4[NKG2D]_H1.44_L1; SEQ ID NOS: 1299 and 51 of 1D7B4[NKG2D]_H1.45_L1; SEQ ID NOS: 1301 and 51 of 1D7B4[NKG2D]_H1.46_L1; SEQ ID NOS: 1303 and 51 of 1D7B4[NKG2D]_H1.47_L1; and SEQ ID NOS: 1305 and 51 of 1D7B4[NKG2D]_H1.48_L1, as depicted in FIGS. 23 and 58.

[0017] In some embodiments, the first variable light domain of the anti-NKG2D scFv is covalently attached to the N-terminus of the first Fc domain using a domain linker.

[0018] In some embodiments, the first variable heavy domain of the anti-NKG2D scFv is covalently attached to the N-terminus of the first Fc domain using a domain linker.

[0019] In some embodiments, the scFv linker is a charged scFv linker.

[0020] In some embodiments, the scFv linker is a charged scFv linker having the amino acid sequence (GKPGS)4 (SEQ ID NO:96).

[0021] In some embodiments, the first domain comprises an amino acid substitution(s) selected from the group consisting of S239D, I332E, S239D/I332E, G236A, S239E, I332D, G236A/I332E, S239D/I332E/A330L, I332E/A330L, F243L, and S298A, wherein numbering is according to EU numbering.

[0022] In some embodiments, the second domain comprises an amino acid substitution(s) selected from the group consisting of S239D, I332E, S239D/I332E, G236A, S239E, I332D, G236A/I332E, S239D/I332E/A330L, I332E/A330L, F243L, and S298A, wherein numbering is according to EU numbering.

[0023] In some embodiments, the first and second Fc domains comprise a set of amino acid substitutions selected from the group consisting of: S239D/I332E:S239D/I332E; S239D:S239D; I332E:I332E; WT:S239D/I332E; WT:S239D; WT:I332E; S239D/I332E:WT; S239D:WT; I332E:WT; S239D/I332E:S239D; S239D/I332E:I332E; S239D:S239D/I332E; I332E:S239D/I332E; S239D:I332E; and I332E:S239D, wherein numbering is according to EU numbering.

[0024] In some embodiments, the first or second Fc domain comprises the amino acid substitutions S239D/I332E, wherein numbering is according to EU numbering.

[0025] In some embodiments, the first and second Fc domains further comprise a set of heterodimerization variants selected from the group consisting of those depicted in FIGS. 1A-1E, wherein numbering is according to EU numbering.

[0026] In some embodiments, the set of heterodimerization variants is selected from the group consisting of S364K/E357Q:L368D/K370S; S364K:L368D/K370S; S364K:L368E/K370S; D401K:T411E/K360E/Q362E; and T366W:T366S/L368A/Y407V, wherein numbering is according to EU numbering.

[0027] In some embodiments, the first or second Fc domain further comprises one or more pI variants.

[0028] In some embodiments, the one or more pI variants are N208D/Q295E/N384D/Q418E/N421D, wherein numbering is according to EU numbering.

[0029] In some embodiments, the first and second monomers each further comprise amino acid substitutions selected from the group consisting of M428L/N434S, M428L/N434A, and M252Y/S254T/T256E, wherein numbering is according to EU numbering.

[0030] In some embodiments, the heterodimeric antibody described herein is selected from the group consisting of: the amino acid sequences of SEQ ID NOS:1, 2 and 3 of XENP38597; the amino acid sequences of SEQ ID NOS:4, 5 and 6 of XENP40377; the amino acid sequences of SEQ ID NOS:7, 8 and 3 of XENP38101; the amino acid sequences of SEQ ID NOS:9, 10 and 3 of XENP38108; the amino acid sequences of SEQ ID NOS:11, 2 and 3 of XENP38596; the amino acid sequences of SEQ ID NOS:12, 2, and 13 of XENP38598; the amino acid sequences of SEQ ID NOS:14, 2 and 15 of XENP38599; the amino acid sequences of SEQ ID NOS:4, 16 and 6 of XENP40374; the amino acid sequences of SEQ ID NOS:1307-1308 and 6 of XENP42652; the amino acid sequences of SEQ ID NOS:1309-1310 and 6 of XENP42653; the amino acid sequences of SEQ ID NOS:1311-1312 and 6 of XENP42654; the amino acid sequences of SEQ ID NOS:1313-1314 and 6 of XENP42655; the amino acid sequences of SEQ ID NOS:1315-1316 and 6 of XENP42656, as depicted in FIGS. 19 and 59.

[0031] Also provided is a nucleic acid composition comprising nucleic acids encoding the first and second monomers and the light chain of any of the antibodies described.

[0032] Also provided is a expression vector comprising the nucleic acids described herein.

[0033] Additionally, provided is a host cell transformed with any of the expression vectors described herein.

[0034] In some embodiments, provided is a method of making a heterodimeric antibody comprising culturing any one of the host cells described herein under conditions, wherein the heterodimeric antibody is expressed, and recovering the heterodimeric antibody.

[0035] In another aspect, described herein is a heterodimeric antibody comprising: a) a first monomer comprising: i) an anti-B7H3 scFv comprising a first variable heavy VH1 domain, an scFv linker and a first variable light VL1 domain; and ii) a first Fc domain, wherein the scFv is covalently attached to the N-terminus of the first Fc domain using a domain linker; b) a second monomer comprising a VH2-CH1-hinge-CH2-CH3 monomer, wherein VH2 is a second variable heavy domain and CH2-CH3 is a second Fc domain; and c) a light chain comprising a second variable light VL2 domain, wherein the second variable heavy domain and the second variable light domain form an NKG2D antigen binding domain, and wherein the first Fc domain and/or the second Fc domain comprise an amino acid substitution(s) selected from the group consisting of S239D, I332E, S239D/I332E, G236A, S239E, I332D, G236A/I332E, S239D/I332E/A330L, I332E/A330L, F243L, and S298A, wherein numbering is according to EU numbering and have enhanced FcγRIIIA (CD16a) binding compared to first and second Fc domains lacking such substitution(s).

[0036] In some embodiments, the NKG2D antigen binding domain comprises a set of vhCDR1-3 and the vlCDR1-3 from a variable heavy domain and variable light domain pair selected from the group consisting of SEQ ID NOS: 2604-2606 for vhCDR1-3 and SEQ ID NOS: 2608-2610 for vlCDR1-3 of mAb-C[NKG2D]; SEQ ID NOS: 2612-2614 for vhCDR1-3 and SEQ ID NOS: 2616-2618 for vlCDR1-3 of mAb-D[NKG2D]; SEQ ID NOS: 17-18 and 1256 for vhCDR1-3 of 1D7B4[NKG2D]_H1.23 and SEQ ID NOS: 23, 24, and 26 for vlCDR1-3 of 1D7B4[NKG2D]_L1; SEQ ID NOS: 17-18 and 1272 for vhCDR1-3 of 1D7B4[NKG2D]_H1.31 and SEQ ID NOS: 23, 24, and 26 for vlCDR1-3 of 1D7B4[NKG2D]_L1; SEQ ID NOS: 17-19 for vhCDR1-3 and SEQ ID NOS: 23, 24, and 26 for vlCDR1-3 of 1D7B4[NKG2D]_H1_L1; SEQ ID NOS: 33-35 for vhCDR1-3 and SEQ ID NOS: 23, 24, and 26 for vlCDR1-3 of 1D2B4[NKG2D]_H1_L1; SEQ ID NOS: 1212 and 18-19 for vhCDR1-3 of 1D7B4[NKG2D]_H1.1 and SEQ ID NOS: 23, 24, and 26 for vlCDR1-3; SEQ ID NOS: 1214 and 18-19 for vhCDR1-3 of 1D7B4[NKG2D]_H1.2 and SEQ ID NOS: 23, 24, and 26 for vlCDR1-3; SEQ ID NOS: 1216 and 18-19 for vhCDR1-3 of 1D7B4[NKG2D]_H1.3 and SEQ ID NOS: 23, 24, and 26 for vlCDR1-3; SEQ ID NOS: 1218 and 18-19 for vhCDR1-3 of 1D7B4[NKG2D]_H1.4 and SEQ ID NOS: 23, 24, and 26 for vlCDR1-3; SEQ ID NOS: 1220 and 18-19 for vhCDR1-3 of 1D7B4[NKG2D]_H1.5 and SEQ ID NOS: 23, 24, and 26 for vlCDR1-3; SEQ ID NOS: 1222 and 18-19 for vhCDR1-3 of 1D7B4[NKG2D]_H1.6 and SEQ ID NOS: 23, 24, and 26 for vlCDR1-3; SEQ ID NOS: 1224 and 18-19 for vhCDR1-3 of 1D7B4[NKG2D]_H1.7 and SEQ ID NOS: 23, 24, and 26 for vlCDR1-3; SEQ ID NOS: 1226 and 18-19 for vhCDR1-3 of 1D7B4[NKG2D]_H1.8 and SEQ ID NOS: 23, 24, and 26 for vlCDR1-3; SEQ ID NOS: 17-18 and 1228 for vhCDR1-3 of 1D7B4[NKG2D]_H1.9 and SEQ ID NOS: 23, 24, and 26 for vlCDR1-3; SEQ ID NOS: 17-18 and 1230 for vhCDR1-3 of 1D7B4[NKG2D]_H1.10 and SEQ ID NOS: 23, 24, and 26 for vlCDR1-3; SEQ ID NOS: 17-18 and 1232 for vhCDR1-3 of 1D7B4[NKG2D]_H1.11 and SEQ ID NOS: 23, 24, and 26 for vlCDR1-3; SEQ ID NOS: 12-18 and 1234 for vhCDR1-3 of 1D7B4[NKG2D]_H1.12 and SEQ ID NOS: 23, 24, and 26 for vlCDR1-3; SEQ ID NOS: 12-18 and 1236 for vhCDR1-3 of 1D7B4[NKG2D]_H1.13 and SEQ ID NOS: 23, 24, and 26 for vlCDR1-3; SEQ ID NOS: 17-18 and 1238 for vhCDR1-3 of 1D7B4[NKG2D]_H1.14 and SEQ ID NOS: 23, 24, and 26 for vlCDR1-3; SEQ ID NOS: 17-18 and 1240 for vhCDR1-3 of 1D7B4[NKG2D]_H1.15 and SEQ ID NOS: 23, 24, and 26 for vlCDR1-3; SEQ ID NOS: 17-18 and 1242 for vhCDR1-3 of 1D7B4[NKG2D]_H1.16 and SEQ ID NOS: 23, 24, and 26 for vlCDR1-3; SEQ ID NOS: 17-18 and 1244 for vhCDR1-3 of 1D7B4[NKG2D]_H1.17 and SEQ ID NOS: 23, 24, and 26 for vlCDR1-3; SEQ ID NOS: 17-18 and 1246 for vhCDR1-3 of 1D7B4[NKG2D]_H1.18 and SEQ ID NOS: 23, 24, and 26 for vlCDR1-3; SEQ ID NOS: 17-18 and 1248 for vhCDR1-3 of 1D7B4[NKG2D]_H1.19 and SEQ ID NOS: 23, 24, and 26 for vlCDR1-3; SEQ ID NOS: 17-18 and 1250 for vhCDR1-3 of 1D7B4[NKG2D]_H1.20 and SEQ ID NOS: 23, 24, and 26 for vlCDR1-3; SEQ ID NOS: 17-18 and 1252 for vhCDR1-3 of 1D7B4[NKG2D]_H1.21 and SEQ ID NOS: 23, 24, and 26 for vlCDR1-3; SEQ ID NOS: 17-18 and 1254 for vhCDR1-3 of 1D7B4[NKG2D]_H1.22 and SEQ ID NOS: 23, 24, and 26 for vlCDR1-3; SEQ ID NOS: 17-18 and 1258 for vhCDR1-3 of 1D7B4[NKG2D]_H1.24 and SEQ ID NOS: 23, 24, and 26 for vlCDR1-3; SEQ ID NOS: 17-18 and 1260 for vhCDR1-3 of 1D7B4[NKG2D]_H1.25 and SEQ ID NOS: 23, 24, and 26 for vlCDR1-3; SEQ ID NOS: 17-18 and 1262 for vhCDR1-3 of 1D7B4[NKG2D]_H1.26 and SEQ ID NOS: 23, 24, and 26 for vlCDR1-3; SEQ ID NOS: 17-18 and 1264 for vhCDR1-3 of 1D7B4[NKG2D]_H1.27 and SEQ ID NOS: 23, 24, and 26 for vlCDR1-3; SEQ ID NOS: 17-18 and 1266 for vhCDR1-3 of 1D7B4[NKG2D]_H1.28 and SEQ ID NOS: 23, 24, and 26 for vlCDR1-3; SEQ ID NOS: 17-18 and 1268 for vhCDR1-3 of 1D7B4[NKG2D]_H1.29 and SEQ ID NOS: 23, 24, and 26 for vlCDR1-3; SEQ ID NOS: 17-18 and 1270 for vhCDR1-3 of 1D7B4[NKG2D]_H1.30 and SEQ ID NOS: 23, 24, and 26 for vlCDR1-3; SEQ ID NOS: 17-18 and 1274 for vhCDR1-3 of 1D7B4[NKG2D]_H1.32 and SEQ ID NOS: 23, 24, and 26 for vlCDR1-3; SEQ ID NOS: 17-18 and 1276 for vhCDR1-3 of 1D7B4[NKG2D]_H1.33 and SEQ ID NOS: 23, 24, and 26 for vlCDR1-3; SEQ ID NOS: 17-18 and 1278 for vhCDR1-3 of 1D7B4[NKG2D]_H1.34 and SEQ ID NOS: 23, 24, and 26 for vlCDR1-3; SEQ ID NOS: 17-18 and 1280 for vhCDR1-3 of 1D7B4[NKG2D]_H1.35 and SEQ ID NOS: 23, 24, and 26 for vlCDR1-3; SEQ ID NOS: 17-18 and 1282 for vhCDR1-3 of 1D7B4[NKG2D]_H1.36 and SEQ ID NOS: 23, 24, and 26 for vlCDR1-3; SEQ ID NOS: 17-18 and 1284 for vhCDR1-3 of 1D7B4[NKG2D]_H1.37 and SEQ ID NOS: 23, 24, and 26 for vlCDR1-3; SEQ ID NOS: 17-18 and 1286 for vhCDR1-3 of 1D7B4[NKG2D]_H1.38 and SEQ ID NOS: 23, 24, and 26 for vlCDR1-3; SEQ ID NOS: 17-18 and 1288 for vhCDR1-3 of 1D7B4[NKG2D]_H1.39 and SEQ ID NOS: 23, 24, and 26 for vlCDR1-3; SEQ ID NOS: 17-18 and 1290 for vhCDR1-3 of 1D7B4[NKG2D]_H1.40 and SEQ ID NOS: 23, 24, and 26 for vlCDR1-3; SEQ ID NOS: 17-18 and 1292 for vhCDR1-3 of 1D7B4[NKG2D]_H1.41 and SEQ ID NOS: 23, 24, and 26 for vlCDR1-3; SEQ ID NOS: 17-18 and 1294 for vhCDR1-3 of 1D7B4[NKG2D]_H1.42 and SEQ ID NOS: 23, 24, and 26 for vlCDR1-3; SEQ ID NOS: 17-18 and 1296 for vhCDR1-3 of 1D7B4[NKG2D]_H1.43 and SEQ ID NOS: 23, 24, and 26 for vlCDR1-3; SEQ ID NOS: 17-18 and 1298 for vhCDR1-3 of 1D7B4[NKG2D]_H1.44 and SEQ ID NOS: 23, 24, and 26 for vlCDR1-3; SEQ ID NOS: 17-18 and 1300 for vhCDR1-3 of 1D7B4[NKG2D]_H1.45 and SEQ ID NOS: 23, 24, and 26 for vlCDR1-3; SEQ ID NOS: 17-18 and 1302 for vhCDR1-3 of 1D7B4[NKG2D]_H1.46 and SEQ ID NOS: 23, 24, and 26 for vlCDR1-3; SEQ ID NOS17-18 and 1304 for vhCDR1-3 of 1D7B4[NKG2D]_H1.47 and SEQ ID NOS: 23, 24, and 26 for vlCDR1-3; and SEQ ID NOS: 17-18 and 1306 for vhCDR1-3 of 1D7B4[NKG2D]_H1.48 and SEQ ID NOS: 23, 24, and 26 for vlCDR1-3, as depicted in FIGS. 23 and 58.

[0037] In some embodiments, the NKG2D antigen binding domain comprises a variable heavy domain and variable light domain pair selected from the group consisting of SEQ ID NOS: 2603 and 2607 of mAb-C[NKG2D]; SEQ ID NOS: 2611 and 2615 of mAb-D[NKG2D]; SEQ ID NOS: 1255 and 51 of 1D7B4[NKG2D]_H1.23_L1; SEQ ID NOS: 1271 and 51 of 1D7B4[NKG2D]_H1.31_L1; SEQ ID NOS: 50 and 51 of 1D7B4[NKG2D]_H1_L1; SEQ ID NOS: 52 and 51 of 1D2B4[NKG2D]; SEQ ID NOS: 1211 and 51 of 1D7B4[NKG2D]_H1.1_L1; SEQ ID NOS: 1213 and 51 of 1D7B4[NKG2D]_H1.2_L1; SEQ ID NOS: 1215 and 51 of 1D7B4[NKG2D]_H1.3_L1; SEQ ID NOS: 1217 and 51 of 1D7B4[NKG2D]_H1.4_L1; SEQ ID NOS: 1219 and 51 of 1D7B4[NKG2D]_H1.5_L1; SEQ ID NOS: 1221 and 51 of 1D7B4[NKG2D]_H1.6_L1; SEQ ID NOS: 1223 and 51 of 1D7B4[NKG2D]_H1.7_L1; SEQ ID NOS: 1225 and 51 of 1D7B4[NKG2D]_H1.8_L1; SEQ ID NOS: 1227 and 51 of 1D7B4[NKG2D]_H1.9_L1; SEQ ID NOS: 1229 and 51 of 1D7B4[NKG2D]_H1.10_L1; SEQ ID NOS: 1231 and 51 of 1D7B4[NKG2D]_H1.11_L1; SEQ ID NOS: 1233 and 51 of 1D7B4[NKG2D]_H1.12_L1; SEQ ID NOS: 1235 and 51 of 1D7B4[NKG2D]_H1.13_L1; SEQ ID NOS: 1237 and 51 of 1D7B4[NKG2D]_H1.14_L1; SEQ ID NOS: 1239 and 51 of 1D7B4[NKG2D]_H1.15_L1; SEQ ID NOS: 1241 and 51 of 1D7B4[NKG2D]_H1.16_L1; SEQ ID NOS: 1243 and 51 of 1D7B4[NKG2D]_H1.17_L1; SEQ ID NOS: 1245 and 51 of 1D7B4[NKG2D]_H1.18_L1; SEQ ID NOS: 1247 and 51 of 1D7B4[NKG2D]_H1.19_L1; SEQ ID NOS: 1249 and 51 of 1D7B4[NKG2D]_H1.20_L1; SEQ ID NOS: 1251 and 51 of 1D7B4[NKG2D]_H1.21_L1; SEQ ID NOS: 1253 and 51 of 1D7B4[NKG2D]_H1.22_L1; SEQ ID NOS: 1257 and 51 of 1D7B4[NKG2D]_H1.24_L1; SEQ ID NOS: 1259 and 51 of 1D7B4[NKG2D]_H1.25_L1; SEQ ID NOS: 1261 and 51 of 1D7B4[NKG2D]_H1.26_L1; SEQ ID NOS: 1263 and 51 of 1D7B4[NKG2D]_H1.27_L1; SEQ ID NOS: 1265 and 51 of 1D7B4[NKG2D]_H1.28_L1; SEQ ID NOS: 1267 and 51 of 1D7B4[NKG2D]_H1.29_L1; SEQ ID NOS: 1269 and 51 of 1D7B4[NKG2D]_H1.30_L1; SEQ ID NOS: 1273 and 51 of 1D7B4[NKG2D]_H1.32_L1; SEQ ID NOS: 1275 and 51 of 1D7B4[NKG2D]_H1.33_L1; SEQ ID NOS: 1277 and 51 of 1D7B4[NKG2D]_H1.34_L1; SEQ ID NOS: 1279 and 51 of 1D7B4[NKG2D]_H1.35_L1; SEQ ID NOS: 1281 and 51 of 1D7B4[NKG2D]_H1.36_L1; SEQ ID NOS: 1283 and 51 of 1D7B4[NKG2D]_H1.37_L1; SEQ ID NOS: 1285 and 51 of 1D7B4[NKG2D]_H1.38_L1; SEQ ID NOS: 1287 and 51 of 1D7B4[NKG2D]_H1.39_L1; SEQ ID NOS: 1289 and 51 of 1D7B4[NKG2D]_H1.40_L1; SEQ ID NOS: 1291 and 51 of 1D7B4[NKG2D]_H1.41_L1; SEQ ID NOS: 1293 and 51 of 1D7B4[NKG2D]_H1.42_L1; SEQ ID NOS: 1295 and 51 of 1D7B4[NKG2D]_H1.43_L1; SEQ ID NOS: 1297 and 51 of 1D7B4[NKG2D]_H1.44_L1; SEQ ID NOS: 1299 and 51 of 1D7B4[NKG2D]_H1.45_L1; SEQ ID NOS: 1301 and 51 of 1D7B4[NKG2D]_H1.46_L1; SEQ ID NOS: 1303 and 51 of 1D7B4[NKG2D]_H1.47_L1; and SEQ ID NOS: 1305 and 51 of 1D7B4[NKG2D]_H1.48_L1, as depicted in FIGS. 23 and 58.

[0038] In some embodiments, the anti-B7H3 scFv comprises a set of vhCDR1-3 and vlCDR1-3 from a variable heavy domain and variable light domain pair, wherein the set of vhCDR1-3 and vlCDR1-3 is selected from the group consisting of SEQ ID NOS: 27, 28, and 29 for vhCDR1-3 and SEQ ID NOS: 30, 31, and 32 for vlCDR1-3 of 38E2[B7H3]_H2_L1.1; SEQ ID NOS: 243, 244, and 245 for vhCDR1-3 and SEQ ID NOS: 247, 248, and 249 for vlCDR1-3 of 6A1[B7H3]_H1_L1; SEQ ID NOS: 143, 144, and 22 for vhCDR1-3 and SEQ ID NOS: 23, 24, and 26 for vlCDR1-3 of 2E43.189[B7H3]_H1_L1, and SEQ ID NOS: 20, 21, and 22 for vhCDR1-3 and SEQ ID NOS: 23, 24, and 26 for vlCDR1-3 of 2E43.189[B7H3]_H1.22_L1, as depicted in FIGS. 13 and 14.

[0039] In some embodiments, the anti-B7H3 scFv comprises a variable heavy domain and variable light domain pair selected from the group consisting of SEQ ID NOS: 140 and 141 of 38E2[B7H3]_H2_L1.1; SEQ ID NOS: 242 and 246 of 6A1[B7H3]_H1L1; SEQ ID NOS: 142 and 51 of 2E4A3.189[B7H3] H1_L1; and SEQ ID NOS: 145 and 51 of 2E4A3.189[B7H3]H1.22_L1, as depicted in FIGS. 13 and 14.

[0040] In some embodiments, the first variable light domain of the anti-B7H3 scFv is covalently attached to the N-terminus of the first Fc domain using a domain linker.

[0041] In some embodiments, the first variable heavy domain of the anti-B7H3 scFv is covalently attached to the N-terminus of the first Fc domain using a domain linker.

[0042] In some embodiments, the scFv linker is a charged scFv linker.

[0043] In some embodiments, the scFv linker is a charged scFv linker having the amino acid sequence (GKPGS)4 (SEQ ID NO:96).

[0044] In some embodiments, the first domain comprises an amino acid substitution(s) selected from the group consisting of S239D, I332E, S239D/I332E, G236A, S239E, I332D, G236A/I332E, S239D/I332E/A330L, I332E/A330L, F243L, and S298A, wherein numbering is according to EU numbering.

[0045] In some embodiments, the second domain comprises an amino acid substitution(s) selected from the group consisting of S239D, I332E, S239D/I332E, G236A, S239E, I332D, G236A/I332E, S239D/I332E/A330L, I332E/A330L, F243L, and S298A, wherein numbering is according to EU numbering.

[0046] In some embodiments, the first and second Fc domains comprise a set of amino acid substitutions selected from the group consisting of: S239D/I332E:S239D/I332E; S239D:S239D; I332E:I332E; WT:S239D/I332E; WT:S239D; WT:I332E; S239D/I332E:WT; S239D:WT; I332E:WT; S239D/I332E:S239D; S239D/I332E:I332E; S239D:S239D/I332E; I332E:S239D/I332E; S239D:I332E; and I332E:S239D, wherein numbering is according to EU numbering.

[0047] In some embodiments, the first or second Fc domain comprises the amino acid substitutions S239D/I332E, wherein numbering is according to EU numbering.

[0048] In some embodiments, the first and second Fc domains further comprise a set of heterodimerization variants selected from the group consisting of those depicted in FIGS. 1A-1E, wherein numbering is according to EU numbering.

[0049] In some embodiments, the set of heterodimerization variants selected is from the group consisting of S364K/E357Q:L368D/K370S; S364K:L368D/K370S; S364K:L368E/K370S; D401K:T411E/K360E/Q362E; and T366W:T366S/L368A/Y407V, wherein numbering is according to EU numbering.

[0050] In some embodiments, the first or second Fc domain further comprises one or more pI variants.

[0051] In some embodiments, the one or more pI variants are N208D/Q295E/N384D/Q418E/N421D, wherein numbering is according to EU numbering.

[0052] In some embodiments, the first and second monomers each further comprise amino acid substitutions selected from the group consisting of M428L/N434S, M428L/N434A, and M252Y/S254T/T256E, wherein numbering is according to EU numbering.

[0053] In some embodiments, the heterodimeric antibody described herein is selected from the group consisting of: the amino acid sequences of SEQ ID NOS:1, 2 and 3 of XENP38597; the amino acid sequences of SEQ ID NOS: 4, 5 and 6 of XENP40377; the amino acid sequences of SEQ ID NOS:7, 8 and 3 of XENP38101; the amino acid sequences of SEQ ID NOS: 9, 10 and 3 of XENP38108; the amino acid sequences of SEQ ID NOS: 11, 2 and 3 of XENP38596; the amino acid sequences of SEQ ID NOS: 12, 2, and 13 of XENP38598; the amino acid sequences of SEQ ID NOS:14, 2 and 15 of XENP38599; the amino acid sequences of SEQ ID NOS:4, 16 and 6 of XENP40374; the amino acid sequences of SEQ ID NOS: 1307-1308 and 6 of XENP42652; the amino acid sequences of SEQ ID NOS: 1309-1310 and 6 of XENP42653; the amino acid sequences of SEQ ID NOS: 1311-1312 and 6 of XENP42654; the amino acid sequences of SEQ ID NOS: 1313-1314 and 6 of XENP42655; and the amino acid sequences of SEQ ID NOS: 1315-1316 and 6 of XENP42656; as depicted in FIGS. 19 and 59.

[0054] Also provided is a nucleic acid composition comprising nucleic acids encoding the first and second monomers and the light chain of any of the antibodies described.

[0055] Also provided is a expression vector comprising the nucleic acids described herein.

[0056] Additionally, provided is a host cell transformed with any of the expression vectors described herein.

[0057] In some embodiments, provided is a method of making a heterodimeric antibody comprising culturing any one of the host cells described herein under conditions, wherein the heterodimeric antibody is expressed, and recovering the heterodimeric antibody.

[0058] In a further aspect, a heterodimeric antibody comprising:

[0059] a) a first monomer comprising, from N-terminus to C-terminus, a VH1-CH1-first linker-scFv-second linker-CH2-CH3, wherein the VH1 is a first variable heavy domain, the scFv is an anti-NKG2D scFv, and the CH2-CH3 is a first Fc domain; b) a second monomer comprising, from N-terminus to C-terminus, a VH2-CH1-hinge-CH2-CH3, wherein the VH2 is a second variable heavy domain and the CH2-CH3 is a second Fc domain; and c) a common light chain comprising from N- to C-terminus, VL-CL, wherein the VL is a variable light domain and the CL is a light chain constant domain; wherein the first variable heavy VH1 domain and the variable light VL domain form a first B7H3 antigen binding domain, and the second variable heavy VH2 domain and the variable light VL domain form a second B7H3 antigen binding domain, and wherein the first Fc domain and/or the second Fc domain comprise an amino acid substitution(s) selected from the group consisting of S239D, I332E, S239D/I332E, G236A, S239E, I332D, G236A/I332E, S239D/I332E/A330L, I332E/A330L, F243L, and S298A, wherein numbering is according to EU numbering and have enhanced FcγRIIIA (CD16a) binding compared to first and second Fc domains lacking such substitution(s).

[0060] In some embodiments, the anti-NKG2D scFv comprises a variable heavy domain, an scFv linker and a variable light domain.

[0061] In some embodiments, the anti-NKG2D scFv comprises a set of vhCDR1-3 and vlCDR1-3 from a variable heavy domain and variable light domain pair selected from the group consisting of SEQ ID NOS: 2604-2606 for vhCDR1-3 and SEQ ID NOS: 2608-2610 for vlCDR1-3 of mAb-C[NKG2D]; SEQ ID NOS: 2612-2614 for vhCDR1-3 and SEQ ID NOS: 2616-2618 for vlCDR1-3 of mAb-D[NKG2D]; SEQ ID NOS: 17-18 and 1256 for vhCDR1-3 of 1D7B4[NKG2D]_H1.23 and SEQ ID NOS: 23, 24, and 26 for vlCDR1-3 of 1D7B4[NKG2D]_L1; SEQ ID NOS: 17-18 and 1272 for vhCDR1-3 of 1D7B4[NKG2D]_H1.31 and SEQ ID NOS: 23, 24, and 26 for vlCDR1-3 of 1D7B4[NKG2D]_L1; SEQ ID NOS: 17-19 for vhCDR1-3 and SEQ ID NOS: 23, 24, and 26 for vlCDR1-3 of 1D7B4[NKG2D]_H1_L1; SEQ ID NOS: 33-35 for vhCDR1-3 and SEQ ID NOS: 23, 24, and 26 for vlCDR1-3 of 1D2B4[NKG2D]_H1_L1, as depicted in FIG. 23; SEQ ID NOS: 1212 and 18-19 for vhCDR1-3 of 1D7B4[NKG2D]_H1.1 and SEQ ID NOS: 23, 24, and 26 for vlCDR1-3; SEQ ID NOS: 1214 and 18-19 for vhCDR1-3 of 1D7B4[NKG2D]_H1.2 and SEQ ID NOS: 23, 24, and 26 for vlCDR1-3; SEQ ID NOS: 1216 and 18-19 for vhCDR1-3 of 1D7B4[NKG2D]_H1.3 and SEQ ID NOS: 23, 24, and 26 for vlCDR1-3; SEQ ID NOS: 1218 and 18-19 for vhCDR1-3 of 1D7B4[NKG2D]_H1.4 and SEQ ID NOS: 23, 24, and 26 for vlCDR1-3; SEQ ID NOS: 1220 and 18-19 for vhCDR1-3 of 1D7B4[NKG2D]_H1.5 and SEQ ID NOS: 23, 24, and 26 for vlCDR1-3; SEQ ID NOS: 1222 and 18-19 for vhCDR1-3 of 1D7B4[NKG2D]_H1.6 and SEQ ID NOS: 23, 24, and 26 for vlCDR1-3; SEQ ID NOS: 1224 and 18-19 for vhCDR1-3 of 1D7B4[NKG2D]_H1.7 and SEQ ID NOS: 23, 24, and 26 for vlCDR1-3; SEQ ID NOS: 1226 and 18-19 for vhCDR1-3 of 1D7B4[NKG2D]_H1.8 and SEQ ID NOS: 23, 24, and 26 for vlCDR1-3; SEQ ID NOS: 17-18 and 1228 for vhCDR1-3 of 1D7B4[NKG2D]_H1.9 and SEQ ID NOS: 23, 24, and 26 for vlCDR1-3; SEQ ID NOS: 17, 18 and 1230 for vhCDR1-3 of 1D7B4[NKG2D]_H1.10 and SEQ ID NOS: 23, 24, and 26 for vlCDR1-3; SEQ ID NOS: 17-18 and 1232 for vhCDR1-3 of 1D7B4[NKG2D]_H1.11 and SEQ ID NOS: 23, 24, and 26 for vlCDR1-3; SEQ ID NOS: 12-18 and 1234 for vhCDR1-3 of 1D7B4[NKG2D]_H1.12 and SEQ ID NOS: 23, 24, and 26 for vlCDR1-3; SEQ ID NOS: 12-18 and 1236 for vhCDR1-3 of 1D7B4[NKG2D]_H1.13 and SEQ ID NOS: 23, 24, and 26 for vlCDR1-3; SEQ ID NOS: 17-18 and 1238 for vhCDR1-3 of 1D7B4[NKG2D]_H1.14 and SEQ ID NOS: 23, 24, and 26 for vlCDR1-3; SEQ ID NOS: 17-18 and 1240 for vhCDR1-3 of 1D7B4[NKG2D]_H1.15 and SEQ ID NOS: 23, 24, and 26 for vlCDR1-3; SEQ ID NOS: 17-18 and 1242 for vhCDR1-3 of 1D7B4[NKG2D]_H1.16 and SEQ ID NOS: 23, 24, and 26 for vlCDR1-3; SEQ ID NOS: 17-18 and 1244 for vhCDR1-3 of 1D7B4[NKG2D]_H1.17 and SEQ ID NOS: 23, 24, and 26 for vlCDR1-3; SEQ ID NOS: 17-18 and 1246 for vhCDR1-3 of 1D7B4[NKG2D]_H1.18 and SEQ ID NOS: 23, 24, and 26 for vlCDR1-3; SEQ ID NOS: 17-18 and 1248 for vhCDR1-3 of 1D7B4[NKG2D]_H1.19 and SEQ ID NOS: 23, 24, and 26 for vlCDR1-3; SEQ ID NOS: 17-18 and 1250 for vhCDR1-3 of 1D7B4[NKG2D]_H1.20 and SEQ ID NOS: 23, 24, and 26 for vlCDR1-3; SEQ ID NOS: 17-18 and 1252 for vhCDR1-3 of 1D7B4[NKG2D]_H1.21 and SEQ ID NOS: 23, 24, and 26 for vlCDR1-3; SEQ ID NOS: 17-18 and 1254 for vhCDR1-3 of 1D7B4[NKG2D]_H1.22 and SEQ ID NOS: 23, 24, and 26 for vlCDR1-3; SEQ ID NOS: 17-18 and 1258 for vhCDR1-3 of 1D7B4[NKG2D]_H1.24 and SEQ ID NOS: 23, 24, and 26 for vlCDR1-3; SEQ ID NOS: 17-18 and 1260 for vhCDR1-3 of 1D7B4[NKG2D]_H1.25 and SEQ ID NOS: 23, 24, and 26 for vlCDR1-3; SEQ ID NOS: 17-18 and 1262 for vhCDR1-3 of 1D7B4[NKG2D]_H1.26 and SEQ ID NOS: 23, 24, and 26 for vlCDR1-3; SEQ ID NOS: 17-18 and 1264 for vhCDR1-3 of 1D7B4[NKG2D]_H1.27 and SEQ ID NOS: 23, 24, and 26 for vlCDR1-3; SEQ ID NOS: 17-18 and 1266 for vhCDR1-3 of 1D7B4[NKG2D]_H1.28 and SEQ ID NOS: 23, 24, and 26 for vlCDR1-3; SEQ ID NOS: 17-18 and 1268 for vhCDR1-3 of 1D7B4[NKG2D]_H1.29 and SEQ ID NOS: 23, 24, and 26 for vlCDR1-3; SEQ ID NOS: 17-18 and 1270 for vhCDR1-3 of 1D7B4[NKG2D]_H1.30 and SEQ ID NOS: 23, 24, and 26 for vlCDR1-3; SEQ ID NOS: 17-18 and 1274 for vhCDR1-3 of 1D7B4[NKG2D]_H1.32 and SEQ ID NOS: 23, 24, and 26 for vlCDR1-3; SEQ ID NOS: 17-18 and 1276 for vhCDR1-3 of 1D7B4[NKG2D]_H1.33 and SEQ ID NOS: 23, 24, and 26 for vlCDR1-3; SEQ ID NOS: 17-18 and 1278 for vhCDR1-3 of 1D7B4[NKG2D]_H1.34 and SEQ ID NOS: 23, 24, and 26 for vlCDR1-3; SEQ ID NOS: 17-18 and 1280 for vhCDR1-3 of 1D7B4[NKG2D]_H1.35 and SEQ ID NOS: 23, 24, and 26 for vlCDR1-3; SEQ ID NOS: 17-18 and 1282 for vhCDR1-3 of 1D7B4[NKG2D]_H1.36 and SEQ ID NOS: 23, 24, and 26 for vlCDR1-3; SEQ ID NOS: 17-18 and 1284 for vhCDR1-3 of 1D7B4[NKG2D]_H1.37 and SEQ ID NOS: 23, 24, and 26 for vlCDR1-3; SEQ ID NOS: 17-18 and 1286 for vhCDR1-3 of 1D7B4[NKG2D]_H1.38 and SEQ ID NOS: 23, 24, and 26 for vlCDR1-3; SEQ ID NOS: 17-18 and 1288 for vhCDR1-3 of 1D7B4[NKG2D]_H1.39 and SEQ ID NOS: 23, 24, and 26 for vlCDR1-3; SEQ ID NOS: 17-18 and 1290 for vhCDR1-3 of 1D7B4[NKG2D]_H1.40 and SEQ ID NOS: 23, 24, and 26 for vlCDR1-3; SEQ ID NOS: 17-18 and 1292 for vhCDR1-3 of 1D7B4[NKG2D]_H1.41 and SEQ ID NOS: 23, 24, and 26 for vlCDR1-3; SEQ ID NOS: 17-18 and 1294 for vhCDR1-3 of 1D7B4[NKG2D]_H1.42 and SEQ ID NOS: 23, 24, and 26 for vlCDR1-3; SEQ ID NOS: 17-18 and 1296 for vhCDR1-3 of 1D7B4[NKG2D]_H1.43 and SEQ ID NOS: 23, 24, and 26 for vlCDR1-3; SEQ ID NOS: 17-18 and 1298 for vhCDR1-3 of 1D7B4[NKG2D]_H1.44 and SEQ ID NOS: 23, 24, and 26 for vlCDR1-3; SEQ ID NOS: 17-18 and 1300 for vhCDR1-3 of 1D7B4[NKG2D]_H1.45 and SEQ ID NOS: 23, 24, and 26 for vlCDR1-3; SEQ ID NOS: 17-18 and 1302 for vhCDR1-3 of 1D7B4[NKG2D]_H1.46 and SEQ ID NOS: 23, 24, and 26 for vlCDR1-3; SEQ ID NOS17-18 and 1304 for vhCDR1-3 of 1D7B4[NKG2D]_H1.47 and SEQ ID NOS: 23, 24, and 26 for vlCDR1-3; and SEQ ID NOS: 17-18 and 1306 for vhCDR1-3 of 1D7B4[NKG2D]_H1.48 and SEQ ID NOS: 23, 24, and 26 for vlCDR1-3, as depicted in FIGS. 23 and 58.

[0062] In some embodiments, the anti-NKG2D scFv comprises a variable heavy domain and variable light domain pair selected from the group consisting of SEQ ID NOS: 2603 and 2607 of mAb-C[NKG2D]; SEQ ID NOS: 2611 and 2615 of mAb-D[NKG2D]; SEQ ID NOS: 1255 and 51 of 1D7B4[NKG2D]_H1.23_L1; SEQ ID NOS: 1271 and 51 of 1D7B4[NKG2D]_H1.31_L1; SEQ ID NOS: 50 and 51 of 1D7B4[NKG2D]_H1_L1; SEQ ID NOS: 52 and 51 of 1D2B4[NKG2D]; SEQ ID NOS: 1211 and 51 of 1D7B4[NKG2D]_H1.1_L1; SEQ ID NOS: 1213 and 51 of 1D7B4[NKG2D]_H1.2_L1; SEQ ID NOS: 1215 and 51 of 1D7B4[NKG2D]_H1.3_L1; SEQ ID NOS: 1217 and 51 of 1D7B4[NKG2D]_H1.4_L1; SEQ ID NOS: 1219 and 51 of 1D7B4[NKG2D]_H1.5_L1; SEQ ID NOS: 1221 and 51 of 1D7B4[NKG2D]_H1.6_L1; SEQ ID NOS: 1223 and 51 of 1D7B4[NKG2D]_H1.7_L1; SEQ ID NOS: 1225 and 51 of 1D7B4[NKG2D]_H1.8_L1; SEQ ID NOS: 1227 and 51 of 1D7B4[NKG2D]_H1.9_L1; SEQ ID NOS: 1229 and 51 of 1D7B4[NKG2D]_H1.10_L1; SEQ ID NOS: 1231 and 51 of 1D7B4[NKG2D]_H1.11_L1; SEQ ID NOS: 1233 and 51 of 1D7B4[NKG2D]_H1.12_L1; SEQ ID NOS: 1235 and 51 of 1D7B4[NKG2D]_H1.13_L1; SEQ ID NOS: 1237 and 51 of 1D7B4[NKG2D]_H1.14_L1; SEQ ID NOS: 1239 and 51 of 1D7B4[NKG2D]_H1.15_L1; SEQ ID NOS: 1241 and 51 of 1D7B4[NKG2D]_H1.16_L1; SEQ ID NOS: 1243 and 51 of 1D7B4[NKG2D]_H1.17_L1; SEQ ID NOS: 1245 and 51 of 1D7B4[NKG2D]_H1.18_L1; SEQ ID NOS: 1247 and 51 of 1D7B4[NKG2D]_H1.19_L1; SEQ ID NOS: 1249 and 51 of 1D7B4[NKG2D]_H1.20_L1; SEQ ID NOS: 1251 and 51 of 1D7B4[NKG2D]_H1.21_L1; SEQ ID NOS: 1253 and 51 of 1D7B4[NKG2D]_H1.22_L1; SEQ ID NOS: 1257 and 51 of 1D7B4[NKG2D]_H1.24_L1; SEQ ID NOS: 1259 and 51 of 1D7B4[NKG2D]_H1.25_L1; SEQ ID NOS: 1261 and 51 of 1D7B4[NKG2D]_H1.26_L1; SEQ ID NOS: 1263 and 51 of 1D7B4[NKG2D]_H1.27_L1; SEQ ID NOS: 1265 and 51 of 1D7B4[NKG2D]_H1.28_L1; SEQ ID NOS: 1267 and 51 of 1D7B4[NKG2D]_H1.29_L1; SEQ ID NOS: 1269 and 51 of 1D7B4[NKG2D]_H1.30_L1; SEQ ID NOS: 1273 and 51 of 1D7B4[NKG2D]_H1.32_L1; SEQ ID NOS: 1275 and 51 of 1D7B4[NKG2D]_H1.33_L1; SEQ ID NOS: 1277 and 51 of 1D7B4[NKG2D]_H1.34_L1; SEQ ID NOS: 1279 and 51 of 1D7B4[NKG2D]_H1.35_L1; SEQ ID NOS: 1281 and 51 of 1D7B4[NKG2D]_H1.36_L1; SEQ ID NOS: 1283 and 51 of 1D7B4[NKG2D]_H1.37_L1; SEQ ID NOS: 1285 and 51 of 1D7B4[NKG2D]_H1.38_L1; SEQ ID NOS: 1287 and 51 of 1D7B4[NKG2D]_H1.39_L1; SEQ ID NOS: 1289 and 51 of 1D7B4[NKG2D]_H1.40_L1; SEQ ID NOS: 1291 and 51 of 1D7B4[NKG2D]_H1.41_L1; SEQ ID NOS: 1293 and 51 of 1D7B4[NKG2D]_H1.42_L1; SEQ ID NOS: 1295 and 51 of 1D7B4[NKG2D]_H1.43_L1; SEQ ID NOS: 1297 and 51 of 1D7B4[NKG2D]_H1.44_L1; SEQ ID NOS: 1299 and 51 of 1D7B4[NKG2D]_H1.45_L1; SEQ ID NOS: 1301 and 51 of 1D7B4[NKG2D]_H1.46_L1; SEQ ID NOS: 1303 and 51 of 1D7B4[NKG2D]_H1.47_L1; and SEQ ID NOS: 1305 and 51 of 1D7B4[NKG2D]_H1.48_L1, as depicted in FIGS. 23 and 58.

[0063] In some embodiments, the first and/or second B7H3 antigen binding domains comprise a set of vhCDR1-3 and vlCDR1-3 from a variable heavy domain and variable light domain pair, wherein the set of vhCDR1-3 and vlCDR1-3 is selected from the group consisting of SEQ ID NOS: 27, 28, and 29 for vhCDR1-3 and SEQ ID NOS: 30, 31, and 32 for vlCDR1-3 of 38E2[B7H3]_H2_L1.1; SEQ ID NOS:243, 244, and 245 for vhCDR1-3 and SEQ ID NOS:247, 248, and 249 for vlCDR1-3 of 6A1[B7H3]_H1_L1; SEQ ID NOS:143, 144, and 22 for vhCDR1-3 and SEQ ID NOS:23, 24, and 26 for vlCDR1-3 of 2E43.189[B7H3]_H1_L1; and SEQ ID NOS:20, 21, and 22 for vhCDR1-3 and SEQ ID NOS:23, 24, and 26 for vlCDR1-3 of 2E43.189[B7H3]_H1.22_L1, as depicted in FIGS. 13 and 14.

[0064] In some embodiments, the first and/or second B7H3 antigen binding domains comprise a variable heavy domain and variable light domain pair selected from the group consisting of SEQ ID NOS:140 and 141 of 38E2[B7H3]_H2_L1.1; SEQ ID NOS:242 and 246 of 6A1[B7H3]_H1L1; SEQ ID NOS:142 and 51 of 2E4A3.189[B7H3] H1_L1; and SEQ ID NOS:145 and 51 of 2E4A3.189[B7H3] H1.22_L1, as depicted in FIGS. 13 and 14.

[0065] In some embodiments, the scFv linker is a charged scFv linker.

[0066] In some embodiments, the scFv linker is a charged scFv linker having the amino acid sequence (GKPGS)4 (SEQ ID NO:96).

[0067] In some embodiments, the first and second linkers are each domain linkers.

[0068] In some embodiments, the first domain comprises an amino acid substitution(s) selected from the group consisting of S239D, I332E, S239D/I332E, G236A, S239E, I332D, G236A/I332E, S239D/I332E/A330L, I332E/A330L, F243L, and S298A, wherein numbering is according to EU numbering.

[0069] In some embodiments, the second domain comprises an amino acid substitution(s) selected from the group consisting of S239D, I332E, S239D/I332E, G236A, S239E, I332D, G236A/I332E, S239D/I332E/A330L, I332E/A330L, F243L, and S298A, wherein numbering is according to EU numbering.

[0070] In some embodiments, the first and second Fc domains comprise a set of amino acid substitutions selected from the group consisting of: S239D/I332E:S239D/I332E; S239D:S239D; I332E:I332E; WT:S239D/I332E; WT:S239D; WT:I332E; S239D/I332E:WT; S239D:WT; I332E:WT; S239D/I332E:S239D; S239D/I332E:I332E; S239D:S239D/I332E; I332E:S239D/I332E; S239D:I332E; and I332E:S239D, wherein numbering is according to EU numbering.

[0071] In some embodiments, the first or second Fc domain comprises the amino acid substitutions S239D/I332E, wherein numbering is according to EU numbering.

[0072] In some embodiments, the first and second Fc domains further comprise a set of heterodimerization variants selected from the group consisting of those depicted in FIGS. 1A-1E, wherein numbering is according to EU numbering.

[0073] In some embodiments, the set of heterodimerization variants selected is from the group consisting of S364K/E357Q:L368D/K370S; S364K:L368D/K370S; S364K:L368E/K370S; D401K:T411E/K360E/Q362E; and T366W:T366S/L368A/Y407V, wherein numbering is according to EU numbering.

[0074] In some embodiments, the first or second Fc domain further comprises one or more pI variants.

[0075] In some embodiments, the one or more pI variants are N208D/Q295E/N384D/Q418E/N421D, wherein numbering is according to EU numbering.

[0076] In some embodiments, the first and second monomers each further comprise amino acid substitutions selected from the group consisting of M428L/N434S, M428L/N434A, and M252Y/S254T/T256E, wherein numbering is according to EU numbering.

[0077] The heterodimeric antibody according any one of claims 47-64 comprising the amino acid sequences of SEQ ID NOS:4, 48 and 6 of XENP40591, as depicted in FIG. 20.

[0078] Also provided is a nucleic acid composition comprising nucleic acids encoding the first and second monomers and the light chain of any of the antibodies described.

[0079] Also provided is a expression vector comprising the nucleic acids described herein.

[0080] Additionally, provided is a host cell transformed with any of the expression vectors described herein.

[0081] In some embodiments, provided is a method of making a heterodimeric antibody comprising culturing any one of the host cells described herein under conditions, wherein the heterodimeric antibody is expressed, and recovering the heterodimeric antibody.

[0082] Provided herein is a method of treating cancer in a subject comprising administering any of the heterodimeric antibodies described herein to a subject in need thereof.

[0083] In yet another aspect, provided herein is a heterodimeric antibody comprising: a) a first monomer comprising, from N-terminal to C-terminal, a VH1-CH1-hinge-CH2-CH3-domain linker-scFv, wherein VH1 is a first variable heavy domain, scFv is an anti-NKG2D scFv, and CH2-CH3 is a first Fc domain; b) a second monomer comprising, from N-terminal to C-terminal, a VH2-CH1-hinge-CH2-CH3, wherein CH2-CH3 is a second Fc domain; and c) a light chain comprising, from N-terminus to C-terminus, a VL1-CL, wherein VL1 is a first variable light domain and CL is a constant light domain, wherein the VH1 and the VL1 form a first B7H3 antigen binding domain, and the VH2 domain and the VL1 form a second B7H3 antigen binding domain, and wherein the anti-NKG2D scFv comprises a VH3 domain, a scFv linker, and a VL2 domain, and wherein the first Fc domain and/or the second Fc domain comprise an amino acid substitution(s) selected from the group consisting of S239D, I332E, S239D/I332E, G236A, S239E, I332D, G236A/I332E, S239D/I332E/A330L, I332E/A330L, F243L, and S298A, wherein numbering is according to EU numbering and have enhanced FcγRIIIA (CD16a) binding compared to first and second Fc domains lacking such substitution(s).

[0084] In some embodiments, the B7H3 antigen binding domain comprises a set of vhCDR1-3 and vlCDR1-3 from a variable heavy domain and variable light domain pair, wherein the set of vhCDR1-3 and vlCDR1-3 is selected from the group consisting of SEQ ID NOS: 27, 28, and 29 for vhCDR1-3 and SEQ ID NOS: 30, 31, and 32 for vlCDR1-3 of 38E2[B7H3]_H2_L1.1; SEQ ID NOS: 243, 244, and 245 for vhCDR1-3 and SEQ ID NOS: 247, 248, and 249 for vlCDR1-3 of 6A1[B7H3]_H1_L1; SEQ ID NOS: 143, 144, and 22 for vhCDR1-3 and SEQ ID NOS: 23, 24, and 26 for vlCDR1-3 of 2E43.189[B7H3]_H1_L1, and SEQ ID NOS: 20, 21, and 22 for vhCDR1-3 and SEQ ID NOS: 23, 24, and 26 for vlCDR1-3 of 2E43.189[B7H3]_H1.22_L1, as depicted in FIGS. 13 and 14.

[0085] In some embodiments, the B7H3 antigen binding domain comprises a variable heavy domain and variable light domain pair selected from the group consisting of SEQ ID NOS: 140 and 141 of 38E2[B7H3]_H2_L1.1; SEQ ID NOS: 242 and 246 of 6A1[B7H3]_H1_L1; SEQ ID NOS: 142 and 51 of 2E4A3.189[B7H3]_H1_L1; and SEQ ID NOS: 145 and 51 of 2E4A3.189[B7H3]_H1.22_L1, as depicted in FIGS. 13 and 14.

[0086] In some embodiments, the anti-NKG2D scFv comprises a set of vhCDR1-3 and vlCDR1-3 from a variable heavy domain and variable light domain pair selected from the group consisting of SEQ ID NOS: 2604-2606 for vhCDR1-3 and SEQ ID NOS: 2608-2610 for vlCDR1-3 of mAb-C[NKG2D]; SEQ ID NOS: 2612-2614 for vhCDR1-3 and SEQ ID NOS: 2616-2618 for vlCDR1-3 of mAb-D[NKG2D]; SEQ ID NOS: 17-18 and 1256 for vhCDR1-3 of 1D7B4[NKG2D]_H1.23 and SEQ ID NOS: 23, 24, and 26 for vlCDR1-3 of 1D7B4[NKG2D]_L1; SEQ ID NOS: 17-18 and 1272 for vhCDR1-3 of 1D7B4[NKG2D]_H1.31 and SEQ ID NOS: 23, 24, and 26 for vlCDR1-3 of 1D7B4[NKG2D]_L1; SEQ ID NOS: 17-19 for vhCDR1-3 and SEQ ID NOS: 23, 24, and 26 for vlCDR1-3 of 1D7B4[NKG2D]_H1_L1; SEQ ID NOS: 33-35 for vhCDR1-3 and SEQ ID NOS: 23, 24, and 26 for vlCDR1-3 of 1D2B4[NKG2D]_H1_L1; SEQ ID NOS: 1212 and 18-19 for vhCDR1-3 of 1D7B4[NKG2D]_H1.1 and SEQ ID NOS: 23, 24, and 26 for vlCDR1-3; SEQ ID NOS: 1214 and 18-19 for vhCDR1-3 of 1D7B4[NKG2D]_H1.2 and SEQ ID NOS: 23, 24, and 26 for vlCDR1-3; SEQ ID NOS: 1216 and 18-19 for vhCDR1-3 of 1D7B4[NKG2D]_H1.3 and SEQ ID NOS: 23, 24, and 26 for vlCDR1-3; SEQ ID NOS: 1218 and 18-19 for vhCDR1-3 of 1D7B4[NKG2D]_H1.4 and SEQ ID NOS: 23, 24, and 26 for vlCDR1-3; SEQ ID NOS: 1220 and 18-19 for vhCDR1-3 of 1D7B4[NKG2D]_H1.5 and SEQ ID NOS: 23, 24, and 26 for vlCDR1-3; SEQ ID NOS: 1222 and 18-19 for vhCDR1-3 of 1D7B4[NKG2D]_H1.6 and SEQ ID NOS: 23, 24, and 26 for vlCDR1-3; SEQ ID NOS: 1224 and 18-19 for vhCDR1-3 of 1D7B4[NKG2D]_H1.7 and SEQ ID NOS: 23, 24, and 26 for vlCDR1-3; SEQ ID NOS: 1226 and 18-19 for vhCDR1-3 of 1D7B4[NKG2D]_H1.8 and SEQ ID NOS: 23, 24, and 26 for vlCDR1-3; SEQ ID NOS: 17-18 and 1228 for vhCDR1-3 of 1D7B4[NKG2D]_H1.9 and SEQ ID NOS: 23, 24, and 26 for vlCDR1-3; SEQ ID NOS: 14-18 and 1230 for vhCDR1-3 of 1D7B4[NKG2D]_H1.10 and SEQ ID NOS: 23, 24, and 26 for vlCDR1-3; SEQ ID NOS: 17-18 and 1232 for vhCDR1-3 of 1D7B4[NKG2D]_H1.11 and SEQ ID NOS: 23, 24, and 26 for vlCDR1-3; SEQ ID NOS: 12-18 and 1234 for vhCDR1-3 of 1D7B4[NKG2D]_H1.12 and SEQ ID NOS: 23, 24, and 26 for vlCDR1-3; SEQ ID NOS: 12-18 and 1236 for vhCDR1-3 of 1D7B4[NKG2D]_H1.13 and SEQ ID NOS: 23, 24, and 26 for vlCDR1-3; SEQ ID NOS: 17-18 and 1238 for vhCDR1-3 of 1D7B4[NKG2D]_H1.14 and SEQ ID NOS: 23, 24, and 26 for vlCDR1-3; SEQ ID NOS: 17-18 and 1240 for vhCDR1-3 of 1D7B4[NKG2D]_H1.15 and SEQ ID NOS: 23, 24, and 26 for vlCDR1-3; SEQ ID NOS: 17-18 and 1242 for vhCDR1-3 of 1D7B4[NKG2D]_H1.16 and SEQ ID NOS: 23, 24, and 26 for vlCDR1-3; SEQ ID NOS: 17-18 and 1244 for vhCDR1-3 of 1D7B4[NKG2D]_H1.17 and SEQ ID NOS: 23, 24, and 26 for vlCDR1-3; SEQ ID NOS: 17-18 and 1246 for vhCDR1-3 of 1D7B4[NKG2D]_H1.18 and SEQ ID NOS: 23, 24, and 26 for vlCDR1-3; SEQ ID NOS: 17-18 and 1248 for vhCDR1-3 of 1D7B4[NKG2D]_H1.19 and SEQ ID NOS: 23, 24, and 26 for vlCDR1-3; SEQ ID NOS: 17-18 and 1250 for vhCDR1-3 of 1D7B4[NKG2D]_H1.20 and SEQ ID NOS: 23, 24, and 26 for vlCDR1-3; SEQ ID NOS: 17-18 and 1252 for vhCDR1-3 of 1D7B4[NKG2D]_H1.21 and SEQ ID NOS: 23, 24, and 26 for vlCDR1-3; SEQ ID NOS: 17-18 and 1254 for vhCDR1-3 of 1D7B4[NKG2D]_H1.22 and SEQ ID NOS: 23, 24, and 26 for vlCDR1-3; SEQ ID NOS: 17-18 and 1258 for vhCDR1-3 of 1D7B4[NKG2D]_H1.24 and SEQ ID NOS: 23, 24, and 26 for vlCDR1-3; SEQ ID NOS: 17-18 and 1260 for vhCDR1-3 of 1D7B4[NKG2D]_H1.25 and SEQ ID NOS: 23, 24, and 26 for vlCDR1-3; SEQ ID NOS: 17-18 and 1262 for vhCDR1-3 of 1D7B4[NKG2D]_H1.26 and SEQ ID NOS: 23, 24, and 26 for vlCDR1-3; SEQ ID NOS: 17-18 and 1264 for vhCDR1-3 of 1D7B4[NKG2D]_H1.27 and SEQ ID NOS: 23, 24, and 26 for vlCDR1-3; SEQ ID NOS: 17-18 and 1266 for vhCDR1-3 of 1D7B4[NKG2D]_H1.28 and SEQ ID NOS: 23, 24, and 26 for vlCDR1-3; SEQ ID NOS: 17-18 and 1268 for vhCDR1-3 of 1D7B4[NKG2D]_H1.29 and SEQ ID NOS: 23, 24, and 26 for vlCDR1-3; SEQ ID NOS: 17-18 and 1270 for vhCDR1-3 of 1D7B4[NKG2D]_H1.30 and SEQ ID NOS: 23, 24, and 26 for vlCDR1-3; SEQ ID NOS: 17-18 and 1274 for vhCDR1-3 of 1D7B4[NKG2D]_H1.32 and SEQ ID NOS: 23, 24, and 26 for vlCDR1-3; SEQ ID NOS: 17-18 and 1276 for vhCDR1-3 of 1D7B4[NKG2D]_H1.33 and SEQ ID NOS: 23, 24, and 26 for vlCDR1-3; SEQ ID NOS: 17-18 and 1278 for vhCDR1-3 of 1D7B4[NKG2D]_H1.34 and SEQ ID NOS: 23, 24, and 26 for vlCDR1-3; SEQ ID NOS: 17-18 and 1280 for vhCDR1-3 of 1D7B4[NKG2D]_H1.35 and SEQ ID NOS: 23, 24, and 26 for vlCDR1-3; SEQ ID NOS: 17-18 and 1282 for vhCDR1-3 of 1D7B4[NKG2D]_H1.36 and SEQ ID NOS: 23, 24, and 26 for vlCDR1-3; SEQ ID NOS: 17-18 and 1284 for vhCDR1-3 of 1D7B4[NKG2D]_H1.37 and SEQ ID NOS: 23, 24, and 26 for vlCDR1-3; SEQ ID NOS: 17-18 and 1286 for vhCDR1-3 of 1D7B4[NKG2D]_H1.38 and SEQ ID NOS: 23, 24, and 26 for vlCDR1-3; SEQ ID NOS: 17-18 and 1288 for vhCDR1-3 of 1D7B4[NKG2D]_H1.39 and SEQ ID NOS: 23, 24, and 26 for vlCDR1-3; SEQ ID NOS: 17-18 and 1290 for vhCDR1-3 of 1D7B4[NKG2D]_H1.40 and SEQ ID NOS: 23, 24, and 26 for vlCDR1-3; SEQ ID NOS: 17-18 and 1292 for vhCDR1-3 of 1D7B4[NKG2D]_H1.41 and SEQ ID NOS: 23, 24, and 26 for vlCDR1-3; SEQ ID NOS: 17-18 and 1294 for vhCDR1-3 of 1D7B4[NKG2D]_H1.42 and SEQ ID NOS: 23, 24, and 26 for vlCDR1-3; SEQ ID NOS: 17-18 and 1296 for vhCDR1-3 of 1D7B4[NKG2D]_H1.43 and SEQ ID NOS: 23, 24, and 26 for vlCDR1-3; SEQ ID NOS: 17-18 and 1298 for vhCDR1-3 of 1D7B4[NKG2D]_H1.44 and SEQ ID NOS: 23, 24, and 26 for vlCDR1-3; SEQ ID NOS: 17-18 and 1300 for vhCDR1-3 of 1D7B4[NKG2D]_H1.45 and SEQ ID NOS: 23, 24, and 26 for vlCDR1-3; SEQ ID NOS: 17-18 and 1302 for vhCDR1-3 of 1D7B4[NKG2D]_H1.46 and SEQ ID NOS: 23, 24, and 26 for vlCDR1-3; SEQ ID NOS17-18 and 1304 for vhCDR1-3 of 1D7B4[NKG2D]_H1.47 and SEQ ID NOS: 23, 24, and 26 for vlCDR1-3; and SEQ ID NOS: 17-18 and 1306 for vhCDR1-3 of 1D7B4[NKG2D]_H1.48 and SEQ ID NOS: 23, 24, and 26 for vlCDR1-3, as depicted in FIGS. 23 and 58.

[0087] In some embodiments, the anti-NKG2D scFv comprises a variable heavy domain and variable light domain pair selected from the group consisting of SEQ ID NOS: 2603 and 2607 of mAb-C[NKG2D]; SEQ ID NOS: 2611 and 2615 of mAb-D[NKG2D]; SEQ ID NOS: 1255 and 51 of 1D7B4[NKG2D]_H1.23_L1; SEQ ID NOS: 1271 and 51 of 1D7B4[NKG2D]_H1.31_L1; SEQ ID NOS: 50 and 51 of 1D7B4[NKG2D]_H1_L1; SEQ ID NOS: 52 and 51 of 1D2B4[NKG2D]; SEQ ID NOS: 1211 and 51 of 1D7B4[NKG2D]_H1.1_L1; SEQ ID NOS: 1213 and 51 of 1D7B4[NKG2D]_H1.2_L1; SEQ ID NOS: 1215 and 51 of 1D7B4[NKG2D]_H1.3_L1; SEQ ID NOS: 1217 and 51 of 1D7B4[NKG2D]_H1.4_L1; SEQ ID NOS: 1219 and 51 of 1D7B4[NKG2D]_H1.5_L1; SEQ ID NOS: 1221 and 51 of 1D7B4[NKG2D]_H1.6_L1; SEQ ID NOS: 1223 and 51 of 1D7B4[NKG2D]_H1.7_L1; SEQ ID NOS: 1225 and 51 of 1D7B4[NKG2D]_H1.8_L1; SEQ ID NOS: 1227 and 51 of 1D7B4[NKG2D]_H1.9_L1; SEQ ID NOS: 1229 and 51 of 1D7B4[NKG2D]_H1.10_L1; SEQ ID NOS: 1231 and 51 of 1D7B4[NKG2D]_H1.11_L1; SEQ ID NOS: 1233 and 51 of 1D7B4[NKG2D]_H1.12_L1; SEQ ID NOS: 1235 and 51 of 1D7B4[NKG2D]_H1.13_L1; SEQ ID NOS: 1237 and 51 of 1D7B4[NKG2D]_H1.14_L1; SEQ ID NOS: 1239 and 51 of 1D7B4[NKG2D]_H1.15_L1; SEQ ID NOS: 1241 and 51 of 1D7B4[NKG2D]_H1.16_L1; SEQ ID NOS: 1243 and 51 of 1D7B4[NKG2D]_H1.17_L1; SEQ ID NOS: 1245 and 51 of 1D7B4[NKG2D]_H1.18_L1; SEQ ID NOS: 1247 and 51 of 1D7B4[NKG2D]_H1.19_L1; SEQ ID NOS: 1249 and 51 of 1D7B4[NKG2D]_H1.20_L1; SEQ ID NOS: 1251 and 51 of 1D7B4[NKG2D]_H1.21_L1; SEQ ID NOS: 1253 and 51 of 1D7B4[NKG2D]_H1.22_L1; SEQ ID NOS: 1257 and 51 of 1D7B4[NKG2D]_H1.24_L1; SEQ ID NOS: 1259 and 51 of 1D7B4[NKG2D]_H1.25_L1; SEQ ID NOS: 1261 and 51 of 1D7B4[NKG2D]_H1.26_L1; SEQ ID NOS: 1263 and 51 of 1D7B4[NKG2D]_H1.27_L1; SEQ ID NOS: 1265 and 51 of 1D7B4[NKG2D]_H1.28_L1; SEQ ID NOS: 1267 and 51 of 1D7B4[NKG2D]_H1.29_L1; SEQ ID NOS: 1269 and 51 of 1D7B4[NKG2D]_H1.30_L1; SEQ ID NOS: 1273 and 51 of 1D7B4[NKG2D]_H1.32_L1; SEQ ID NOS: 1275 and 51 of 1D7B4[NKG2D]_H1.33_L1; SEQ ID NOS: 1277 and 51 of 1D7B4[NKG2D]_H1.34_L1; SEQ ID NOS: 1279 and 51 of 1D7B4[NKG2D]_H1.35_L1; SEQ ID NOS: 1281 and 51 of 1D7B4[NKG2D]_H1.36_L1; SEQ ID NOS: 1283 and 51 of 1D7B4[NKG2D]_H1.37_L1; SEQ ID NOS: 1285 and 51 of 1D7B4[NKG2D]_H1.38_L1; SEQ ID NOS: 1287 and 51 of 1D7B4[NKG2D]_H1.39_L1; SEQ ID NOS: 1289 and 51 of 1D7B4[NKG2D]_H1.40_L1; SEQ ID NOS: 1291 and 51 of 1D7B4[NKG2D]_H1.41_L1; SEQ ID NOS: 1293 and 51 of 1D7B4[NKG2D]_H1.42_L1; SEQ ID NOS: 1295 and 51 of 1D7B4[NKG2D]_H1.43_L1; SEQ ID NOS: 1297 and 51 of 1D7B4[NKG2D]_H1.44_L1; SEQ ID NOS: 1299 and 51 of 1D7B4[NKG2D]_H1.45_L1; SEQ ID NOS: 1301 and 51 of 1D7B4[NKG2D]_H1.46_L1; SEQ ID NOS: 1303 and 51 of 1D7B4[NKG2D]_H1.47_L1; and SEQ ID NOS: 1305 and 51 of 1D7B4[NKG2D]_H1.48_L1, as depicted in FIGS. 23 and 58.

[0088] In some embodiments, the scFv linker is a charged scFv linker.

[0089] In some embodiments, the scFv linker is a charged scFv linker having the amino acid sequence (GKPGS)4 (SEQ ID NO:96).

[0090] In some embodiments, the first domain comprises an amino acid substitution(s) selected from the group consisting of S239D, I332E, S239D/I332E, G236A, S239E, I332D, G236A/I332E, S239D/I332E/A330L, I332E/A330L, F243L, and S298A, wherein numbering is according to EU numbering.

[0091] In some embodiments, the second domain comprises an amino acid substitution(s) selected from the group consisting of S239D, I332E, S239D/I332E, G236A, S239E, I332D, G236A/I332E, S239D/I332E/A330L, I332E/A330L, F243L, and S298A, wherein numbering is according to EU numbering.

[0092] In some embodiments, the first and second Fc domains comprise a set of amino acid substitutions selected from the group consisting of: S239D/I332E:S239D/I332E; S239D:S239D; I332E:I332E; WT:S239D/I332E; WT:S239D; WT:I332E; S239D/I332E:WT; S239D:WT; I332E:WT; S239D/I332E:S239D; S239D/I332E:I332E; S239D:S239D/I332E; I332E:S239D/I332E; S239D:I332E; and I332E:S239D, wherein numbering is according to EU numbering.

[0093] In some embodiments, the first or second Fc domain comprises the amino acid substitutions S239D/I332E, wherein numbering is according to EU numbering.

[0094] In some embodiments, the first and second Fc domains further comprise a set of heterodimerization variants selected from the group consisting of those depicted in FIGS. 1A-1E, wherein numbering is according to EU numbering.

[0095] In some embodiments, the set of heterodimerization variants is selected from the group consisting of S364K/E357Q:L368D/K370S; S364K:L368D/K370S; S364K:L368E/K370S; D401K:T411E/K360E/Q362E; and T366W:T366S/L368A/Y407V, wherein numbering is according to EU numbering.

[0096] In some embodiments, the first or second Fc domain comprises one or more pI variants.

[0097] In some embodiments, the one or more pI variants are N208D/Q295E/N384D/Q418E/N421D, wherein numbering is according to EU numbering.

[0098] In some embodiments, the first and second monomers each further comprise amino acid substitutions selected from the group consisting of M428L/N434S, M428L/N434A, and M252Y/S254T/T256E, wherein numbering is according to EU numbering.

[0099] In many embodiments, the heterodimeric antibody comprises the amino acid sequences of SEQ ID NOS:4, 49 and 6 of XENP40556.

[0100] In one aspect, provided herein is a heterodimeric antibody comprising: a) a first monomer comprising, from N-terminal to C-terminal, a VH1-CH1-hinge-first linker-VH1-CH1-hinge-CH2-CH3, wherein VH1 is a first variable heavy domain and CH2-CH3 is a first Fc domain; b) a light chain comprising, from N-terminus to C-terminus, a VL1-CL, wherein VL1 is a first variable light domain and CL is a constant light domain, and wherein the VH1 and the VL1 form B7H3 antigen binding domains; and c) a second monomer comprising, from N-terminal to C-terminal, an anti-NKG2D scFv and a second Fc domain, wherein the scFv is covalently attached to the N-terminus of the second Fc domain using a domain linker, and wherein the first Fc domain and/or the second Fc domain comprise an amino acid substitution(s) selected from the group consisting of S239D, I332E, S239D/I332E, G236A, S239E, I332D, G236A/I332E, S239D/I332E/A330L, I332E/A330L, F243L, and S298A, wherein numbering is according to EU numbering and have enhanced FcγRIIIA (CD16a) binding compared to first and second Fc domains lacking such substitution(s).

[0101] In some embodiments, the anti-NKG2D scFv comprising a second variable heavy VH2 domain, an scFv linker and a second variable light VL2 domain.

[0102] In some embodiments, the anti-NKG2D scFv comprises a set of vhCDR1-3 and vlCDR1-3 from a variable heavy domain and variable light domain pair selected from the group consisting of SEQ ID NOS: 2604-2606 for vhCDR1-3 and SEQ ID NOS: 2608-2610 for vlCDR1-3 of mAb-C[NKG2D]; SEQ ID NOS: 2612-2614 for vhCDR1-3 and SEQ ID NOS: 2616-2618 for vlCDR1-3 of mAb-D[NKG2D]; SEQ ID NOS: 17-18 and 1256 for vhCDR1-3 of 1D7B4[NKG2D]_H1.23 and SEQ ID NOS: 23, 24, and 26 for vlCDR1-3 of 1D7B4[NKG2D]_L1; SEQ ID NOS: 17-18 and 1272 for vhCDR1-3 of 1D7B4[NKG2D]_H1.31 and SEQ ID NOS: 23, 24, and 26 for vlCDR1-3 of 1D7B4[NKG2D]_L1; SEQ ID NOS: 17-19 for vhCDR1-3 and SEQ ID NOS: 23, 24, and 26 for vlCDR1-3 of 1D7B4[NKG2D]_H1_L1; SEQ ID NOS: 33-35 for vhCDR1-3 and SEQ ID NOS: 23, 24, and 26 for vlCDR1-3 of 1D2B4[NKG2D]_H1_L1; SEQ ID NOS: 1212 and 18-19 for vhCDR1-3 of 1D7B4[NKG2D]_H1.1 and SEQ ID NOS: 23, 24, and 26 for vlCDR1-3; SEQ ID NOS: 1214 and 18-19 for vhCDR1-3 of 1D7B4[NKG2D]_H1.2 and SEQ ID NOS: 23, 24, and 26 for vlCDR1-3; SEQ ID NOS: 1216 and 18-19 for vhCDR1-3 of 1D7B4[NKG2D]_H1.3 and SEQ ID NOS: 23, 24, and 26 for vlCDR1-3; SEQ ID NOS: 1218 and 18-19 for vhCDR1-3 of 1D7B4[NKG2D]_H1.4 and SEQ ID NOS: 23, 24, and 26 for vlCDR1-3; SEQ ID NOS: 1220 and 18-19 for vhCDR1-3 of 1D7B4[NKG2D]_H1.5 and SEQ ID NOS: 23, 24, and 26 for vlCDR1-3; SEQ ID NOS: 1222 and 18-19 for vhCDR1-3 of 1D7B4[NKG2D]_H1.6 and SEQ ID NOS: 23, 24, and 26 for vlCDR1-3; SEQ ID NOS: 1224 and 18-19 for vhCDR1-3 of 1D7B4[NKG2D]_H1.7 and SEQ ID NOS: 23, 24, and 26 for vlCDR1-3; SEQ ID NOS: 1226 and 18-19 for vhCDR1-3 of 1D7B4[NKG2D]_H1.8 and SEQ ID NOS: 23, 24, and 26 for vlCDR1-3; SEQ ID NOS: 17-18 and 1228 for vhCDR1-3 of 1D7B4[NKG2D]_H1.9 and SEQ ID NOS: 23, 24, and 26 for vlCDR1-3; SEQ ID NOS: 17-18 and 1230 for vhCDR1-3 of 1D7B4[NKG2D]_H1.10 and SEQ ID NOS: 23, 24, and 26 for vlCDR1-3; SEQ ID NOS: 17-18 and 1232 for vhCDR1-3 of 1D7B4[NKG2D]_H1.11 and SEQ ID NOS: 23, 24, and 26 for vlCDR1-3; SEQ ID NOS: 12-18 and 1234 for vhCDR1-3 of 1D7B4[NKG2D]_H1.12 and SEQ ID NOS: 23, 24, and 26 for vlCDR1-3; SEQ ID NOS: 17-18 and 1236 for vhCDR1-3 of 1D7B4[NKG2D]_H1.13 and SEQ ID NOS: 23, 24, and 26 for vlCDR1-3; SEQ ID NOS: 17-18 and 1238 for vhCDR1-3 of 1D7B4[NKG2D]_H1.14 and SEQ ID NOS: 23, 24, and 26 for vlCDR1-3; SEQ ID NOS: 17-18 and 1240 for vhCDR1-3 of 1D7B4[NKG2D]_H1.15 and SEQ ID NOS: 23, 24, and 26 for vlCDR1-3; SEQ ID NOS: 17-18 and 1242 for vhCDR1-3 of 1D7B4[NKG2D]_H1.16 and SEQ ID NOS: 23, 24, and 26 for vlCDR1-3; SEQ ID NOS: 17-18 and 1244 for vhCDR1-3 of 1D7B4[NKG2D]_H1.17 and SEQ ID NOS: 23, 24, and 26 for vlCDR1-3; SEQ ID NOS: 17-18 and 1246 for vhCDR1-3 of 1D7B4[NKG2D]_H1.18 and SEQ ID NOS: 23, 24, and 26 for vlCDR1-3; SEQ ID NOS: 17-18 and 1248 for vhCDR1-3 of 1D7B4[NKG2D]_H1.19 and SEQ ID NOS: 23, 24, and 26 for vlCDR1-3; SEQ ID NOS: 17-18 and 1250 for vhCDR1-3 of 1D7B4[NKG2D]_H1.20 and SEQ ID NOS: 23, 24, and 26 for vlCDR1-3; SEQ ID NOS: 17-18 and 1252 for vhCDR1-3 of 1D7B4[NKG2D]_H1.21 and SEQ ID NOS: 23, 24, and 26 for vlCDR1-3; SEQ ID NOS: 17-18 and 1254 for vhCDR1-3 of 1D7B4[NKG2D]_H1.22 and SEQ ID NOS: 23, 24, and 26 for vlCDR1-3; SEQ ID NOS: 17-18 and 1258 for vhCDR1-3 of 1D7B4[NKG2D]_H1.24 and SEQ ID NOS: 23, 24, and 26 for vlCDR1-3; SEQ ID NOS: 17-18 and 1260 for vhCDR1-3 of 1D7B4[NKG2D]_H1.25 and SEQ ID NOS: 23, 24, and 26 for vlCDR1-3; SEQ ID NOS: 17-18 and 1262 for vhCDR1-3 of 1D7B4[NKG2D]_H1.26 and SEQ ID NOS: 23, 24, and 26 for vlCDR1-3; SEQ ID NOS: 17-18 and 1264 for vhCDR1-3 of 1D7B4[NKG2D]_H1.27 and SEQ ID NOS: 23, 24, and 26 for vlCDR1-3; SEQ ID NOS: 17-18 and 1266 for vhCDR1-3 of 1D7B4[NKG2D]_H1.28 and SEQ ID NOS: 23, 24, and 26 for vlCDR1-3; SEQ ID NOS: 17-18 and 1268 for vhCDR1-3 of 1D7B4[NKG2D]_H1.29 and SEQ ID NOS: 23, 24, and 26 for vlCDR1-3; SEQ ID NOS: 17-18 and 1270 for vhCDR1-3 of 1D7B4[NKG2D]_H1.30 and SEQ ID NOS: 23, 24, and 26 for vlCDR1-3; SEQ ID NOS: 17-18 and 1274 for vhCDR1-3 of 1D7B4[NKG2D]_H1.32 and SEQ ID NOS: 23, 24, and 26 for vlCDR1-3; SEQ ID NOS: 17-18 and 1276 for vhCDR1-3 of 1D7B4[NKG2D]_H1.33 and SEQ ID NOS: 23, 24, and 26 for vlCDR1-3; SEQ ID NOS: 17-18 and 1278 for vhCDR1-3 of 1D7B4[NKG2D]_H1.34 and SEQ ID NOS: 23, 24, and 26 for vlCDR1-3; SEQ ID NOS: 17-18 and 1280 for vhCDR1-3 of 1D7B4[NKG2D]_H1.35 and SEQ ID NOS: 23, 24, and 26 for vlCDR1-3; SEQ ID NOS: 17-18 and 1282 for vhCDR1-3 of 1D7B4[NKG2D]_H1.36 and SEQ ID NOS: 23, 24, and 26 for vlCDR1-3; SEQ ID NOS: 17-18 and 1284 for vhCDR1-3 of 1D7B4[NKG2D]_H1.37 and SEQ ID NOS: 23, 24, and 26 for vlCDR1-3; SEQ ID NOS: 17-18 and 1286 for vhCDR1-3 of 1D7B4[NKG2D]_H1.38 and SEQ ID NOS: 23, 24, and 26 for vlCDR1-3; SEQ ID NOS: 17-18 and 1288 for vhCDR1-3 of 1D7B4[NKG2D]_H1.39 and SEQ ID NOS: 23, 24, and 26 for vlCDR1-3; SEQ ID NOS: 17-18 and 1290 for vhCDR1-3 of 1D7B4[NKG2D]_H1.40 and SEQ ID NOS: 23, 24, and 26 for vlCDR1-3; SEQ ID NOS: 17-18 and 1292 for vhCDR1-3 of 1D7B4[NKG2D]_H1.41 and SEQ ID NOS: 23, 24, and 26 for vlCDR1-3; SEQ ID NOS: 17-18 and 1294 for vhCDR1-3 of 1D7B4[NKG2D]_H1.42 and SEQ ID NOS: 23, 24, and 26 for vlCDR1-3; SEQ ID NOS: 17-18 and 1296 for vhCDR1-3 of 1D7B4[NKG2D]_H1.43 and SEQ ID NOS: 23, 24, and 26 for vlCDR1-3; SEQ ID NOS: 17-18 and 1298 for vhCDR1-3 of 1D7B4[NKG2D]_H1.44 and SEQ ID NOS: 23, 24, and 26 for vlCDR1-3; SEQ ID NOS: 17-18 and 1300 for vhCDR1-3 of 1D7B4[NKG2D]_H1.45 and SEQ ID NOS: 23, 24, and 26 for vlCDR1-3; SEQ ID NOS: 17-18 and 1302 for vhCDR1-3 of 1D7B4[NKG2D]_H1.46 and SEQ ID NOS: 23, 24, and 26 for vlCDR1-3; SEQ ID NOS17-18 and 1304 for vhCDR1-3 of 1D7B4[NKG2D]_H1.47 and SEQ ID NOS: 23, 24, and 26 for vlCDR1-3; and SEQ ID NOS: 17-18 and 1306 for vhCDR1-3 of 1D7B4[NKG2D]_H1.48 and SEQ ID NOS: 23, 24, and 26 for vlCDR1-3, as depicted in FIGS. 23 and 58.

[0103] In some embodiments, the anti-NKG2D scFv comprises a variable heavy domain and variable light domain pair selected from the group consisting of SEQ ID NOS: 2603 and 2607 of mAb-C[NKG2D]; SEQ ID NOS: 2611 and 2615 of mAb-D[NKG2D]; SEQ ID NOS: 1255 and 51 of 1D7B4[NKG2D]_H1.23_L1; SEQ ID NOS: 1271 and 51 of 1D7B4[NKG2D]_H1.31_L1; SEQ ID NOS: 50 and 51 of 1D7B4[NKG2D]_H1_L1; SEQ ID NOS: 52 and 51 of 1D2B4[NKG2D]; SEQ ID NOS: 1211 and 51 of 1D7B4[NKG2D]_H1.1_L1; SEQ ID NOS: 1213 and 51 of 1D7B4[NKG2D]_H1.2_L1; SEQ ID NOS: 1215 and 51 of 1D7B4[NKG2D]_H1.3_L1; SEQ ID NOS: 1217 and 51 of 1D7B4[NKG2D]_H1.4_L1; SEQ ID NOS: 1219 and 51 of 1D7B4[NKG2D]_H1.5_L1; SEQ ID NOS:1221 and 51 of 1D7B4[NKG2D]_H1.6_L1; SEQ ID NOS:1223 and 51 of 1D7B4[NKG2D]_H1.7_L1; SEQ ID NOS: 1225 and 51 of 1D7B4[NKG2D]_H1.8_L1; SEQ ID NOS: 1227 and 51 of 1D7B4[NKG2D]_H1.9_L1; SEQ ID NOS: 1229 and 51 of 1D7B4[NKG2D]_H1.10_L1; SEQ ID NOS: 1231 and 51 of 1D7B4[NKG2D]_H1.11_L1; SEQ ID NOS: 1233 and 51 of 1D7B4[NKG2D]_H1.12_L1; SEQ ID NOS: 1235 and 51 of 1D7B4[NKG2D]_H1.13_L1; SEQ ID NOS: 1237 and 51 of 1D7B4[NKG2D]_H1.14_L1; SEQ ID NOS: 1239 and 51 of 1D7B4[NKG2D]_H1.15_L1; SEQ ID NOS: 1241 and 51 of 1D7B4[NKG2D]_H1.16_L1; SEQ ID NOS: 1243 and 51 of 1D7B4[NKG2D]_H1.17_L1; SEQ ID NOS: 1245 and 51 of 1D7B4[NKG2D]_H1.18_L1; SEQ ID NOS: 1247 and 51 of 1D7B4[NKG2D]_H1.19_L1; SEQ ID NOS: 1249 and 51 of 1D7B4[NKG2D]_H1.20_L1; SEQ ID NOS: 1251 and 51 of 1D7B4[NKG2D]_H1.21_L1; SEQ ID NOS: 1253 and 51 of 1D7B4[NKG2D]_H1.22_L1; SEQ ID NOS: 1257 and 51 of 1D7B4[NKG2D]_H1.24_L1; SEQ ID NOS: 1259 and 51 of 1D7B4[NKG2D]_H1.25_L1; SEQ ID NOS: 1261 and 51 of 1D7B4[NKG2D]_H1.26_L1; SEQ ID NOS: 1263 and 51 of 1D7B4[NKG2D]_H1.27_L1; SEQ ID NOS: 1265 and 51 of 1D7B4[NKG2D]_H1.28_L1; SEQ ID NOS: 1267 and 51 of 1D7B4[NKG2D]_H1.29_L1; SEQ ID NOS: 1269 and 51 of 1D7B4[NKG2D]_H1.30_L1; SEQ ID NOS: 1273 and 51 of 1D7B4[NKG2D]_H1.32_L1; SEQ ID NOS: 1275 and 51 of 1D7B4[NKG2D]_H1.33_L1; SEQ ID NOS: 1277 and 51 of 1D7B4[NKG2D]_H1.34_L1; SEQ ID NOS: 1279 and 51 of 1D7B4[NKG2D]_H1.35_L1; SEQ ID NOS: 1281 and 51 of 1D7B4[NKG2D]_H1.36_L1; SEQ ID NOS: 1283 and 51 of 1D7B4[NKG2D]_H1.37_L1; SEQ ID NOS: 1285 and 51 of 1D7B4[NKG2D]_H1.38_L1; SEQ ID NOS: 1287 and 51 of 1D7B4[NKG2D]_H1.39_L1; SEQ ID NOS: 1289 and 51 of 1D7B4[NKG2D]_H1.40_L1; SEQ ID NOS: 1291 and 51 of 1D7B4[NKG2D]_H1.41_L1; SEQ ID NOS: 1293 and 51 of 1D7B4[NKG2D]_H1.42_L1; SEQ ID NOS: 1295 and 51 of 1D7B4[NKG2D]_H1.43_L1; SEQ ID NOS: 1297 and 51 of 1D7B4[NKG2D]_H1.44_L1; SEQ ID NOS: 1299 and 51 of 1D7B4[NKG2D]_H1.45_L1; SEQ ID NOS: 1301 and 51 of 1D7B4[NKG2D]_H1.46_L1; SEQ ID NOS: 1303 and 51 of 1D7B4[NKG2D]_H1.47_L1; and SEQ ID NOS: 1305 and 51 of 1D7B4[NKG2D]_H1.48_L1, as depicted in FIGS. 23 and 58.

[0104] In some embodiments, each of the B7H3 antigen binding domains comprise a set of vhCDR1-3 and vlCDR1-3 from a variable heavy domain and variable light domain pair, wherein the set of vhCDR1-3 and vlCDR1-3 is selected from the group consisting of SEQ ID NOS: 27, 28, and 29 for vhCDR1-3 and SEQ ID NOS: 30, 31, and 32 for vlCDR1-3 of 38E2[B7H3]_H2_L1.1; SEQ ID NOS: 243, 244, and 245 for vhCDR1-3 and SEQ ID NOS: 247, 248, and 249 for vlCDR1-3 of 6A1[B7H3]_H1_L1; SEQ ID NOS: 143, 144, and 22 for vhCDR1-3 and SEQ ID NOS: 23, 24, and 26 for vlCDR1-3 of 2E43.189[B7H3]_H1_L1; and SEQ ID NOS: 20, 21, and 22 for vhCDR1-3 and SEQ ID NOS: 23, 24, and 26 for vlCDR1-3 of 2E43.189[B7H3]_H1.22_L1, as depicted in FIGS. 13 and 14.

[0105] In some embodiments, each of the B7H3 antigen binding domains comprise a variable heavy domain and variable light domain pair selected from the group consisting of SEQ ID NOS: 140 and 141 of 38E2[B7H3]_H2_L1.1; SEQ ID NOS: 242 and 246 of 6A1[B7H3]_H1L1; SEQ ID NOS:142 and 51 of 2E4A3.189[B7H3]_H1_L1; and SEQ ID NOS: 145 and 51 of 2E4A3.189[B7H3]_H1.22_L1, as depicted in FIGS. 13 and 14.

[0106] In some embodiments, the scFv linker is a charged scFv linker.

[0107] In some embodiments, the scFv linker is a charged scFv linker having the amino acid sequence (GKPGS)4 (SEQ ID NO:96).

[0108] In some embodiments, the first and second linkers are each domain linkers.

[0109] In some embodiments, the first domain comprises an amino acid substitution(s) selected from the group consisting of S239D, I332E, S239D/I332E, G236A, S239E, I332D, G236A/I332E, S239D/I332E/A330L, I332E/A330L, F243L, and S298A, wherein numbering is according to EU numbering.

[0110] In some embodiments, the second domain comprises an amino acid substitution(s) selected from the group consisting of S239D, I332E, S239D/I332E, G236A, S239E, I332D, G236A/I332E, S239D/I332E/A330L, I332E/A330L, F243L, and S298A, wherein numbering is according to EU numbering.

[0111] In some embodiments, the first and second Fc domains comprise a set of amino acid substitutions selected from the group consisting of: S239D/I332E:S239D/I332E; S239D S239D; I332E:I332E; WT:S239D/I332E; WT:S239D; WT:I332E; S239D/I332E:WT; S239D:WT; I332E:WT; S239D/I332E:S239D; S239D/I332E:I332E; S239D:S239D/I332E; I332E:S239D/I332E; S239D:I332E; and I332E:S239D, wherein numbering is according to EU numbering.

[0112] In some embodiments, the first or second Fc domain comprises the amino acid substitutions S239D/I332E, wherein numbering is according to EU numbering.

[0113] In some embodiments, the first and second Fc domains further comprise a set of heterodimerization variants selected from the group consisting of those depicted in FIGS. 1A-1E, wherein numbering is according to EU numbering.

[0114] In some embodiments, the set of heterodimerization variants is selected from the group consisting of S364K/E357Q:L368D/K370S; S364K:L368D/K370S; S364K:L368E/K370S; D401K:T411E/K360E/Q362E; and T366W:T366S/L368A/Y407V, wherein numbering is according to EU numbering.

[0115] In some embodiments, the first or second Fc domain further comprises one or more pI variants.

[0116] In some embodiments, the one or more pI variants are N208D/Q295E/N384D/Q418E/N421D, wherein numbering is according to EU numbering.

[0117] In some embodiments, the first and second monomers each further comprise amino acid substitutions selected from the group consisting of M428L/N434S, M428L/N434A, and M252Y/S254T/T256E, wherein numbering is according to EU numbering.

[0118] The heterodimeric antibody according any one of claims 88-105, comprises the amino acid sequences of SEQ ID NOS:1209, 1210 and 6 of XENP42983, as depicted in FIG. 57.

[0119] In some aspects, described herein is a composition comprising an NKG2D antigen binding domain, wherein the NKG2D antigen binding domain comprises a set of vhCDR1-3 and vlCDR1-3 from a variable heavy domain and variable light domain pair selected from the group consisting of: SEQ ID NOS: 17-18 and 1256 for vhCDR1-3 of 1D7B4[NKG2D]_H1.23 and SEQ ID NOS: 23, 24, and 26 for vlCDR1-3 of 1D7B4[NKG2D]_L1; SEQ ID NOS: 17-18 and 1272 for vhCDR1-3 of 1D7B4[NKG2D]_H1.31 and SEQ ID NOS: 23, 24, and 26 for vlCDR1-3 of 1D7B4[NKG2D]_L1; SEQ ID NOS: 1212 and 18-19 for vhCDR1-3 of 1D7B4[NKG2D]_H1.1 and SEQ ID NOS: 23, 24, and 26 for vlCDR1-3; SEQ ID NOS: 1214 and 18-19 for vhCDR1-3 of 1D7B4[NKG2D]_H1.2 and SEQ ID NOS: 23, 24, and 26 for vlCDR1-3; SEQ ID NOS: 1216 and 18-19 for vhCDR1-3 of 1D7B4[NKG2D]_H1.3 and SEQ ID NOS: 23, 24, and 26 for vlCDR1-3; SEQ ID NOS: 1218 and 18-19 for vhCDR1-3 of 1D7B4[NKG2D]_H1.4 and SEQ ID NOS: 23, 24, and 26 for vlCDR1-3; SEQ ID NOS: 1220 and 18-19 for vhCDR1-3 of 1D7B4[NKG2D]_H1.5 and SEQ ID NOS: 23, 24, and 26 for vlCDR1-3; SEQ ID NOS: 1222 and 18-19 for vhCDR1-3 of 1D7B4[NKG2D]_H1.6 and SEQ ID NOS: 23, 24, and 26 for vlCDR1-3; SEQ ID NOS: 1224 and 18-19 for vhCDR1-3 of 1D7B4[NKG2D]_H1.7 and SEQ ID NOS: 23, 24, and 26 for vlCDR1-3; SEQ ID NOS: 1226 and 18-19 for vhCDR1-3 of 1D7B4[NKG2D]_H1.8 and SEQ ID NOS: 23, 24, and 26 for vlCDR1-3; SEQ ID NOS: 17-18 and 1228 for vhCDR1-3 of 1D7B4[NKG2D]_H1.9 and SEQ ID NOS: 23, 24, and 26 for vlCDR1-3; SEQ ID NOS: 17, 18 and 1230 for vhCDR1-3 of 1D7B4[NKG2D]_H1.10 and SEQ ID NOS: 23, 24, and 26 for vlCDR1-3; SEQ ID NOS: 17-18 and 1232 for vhCDR1-3 of 1D7B4[NKG2D]_H1.11 and SEQ ID NOS: 23, 24, and 26 for vlCDR1-3; SEQ ID NOS: 12-18 and 1234 for vhCDR1-3 of 1D7B4[NKG2D]_H1.12 and SEQ ID NOS: 23, 24, and 26 for vlCDR1-3; SEQ ID NOS: 12-18 and 1236 for vhCDR1-3 of 1D7B4[NKG2D]_H1.13 and SEQ ID NOS: 23, 24, and 26 for vlCDR1-3; SEQ ID NOS: 17-18 and 1238 for vhCDR1-3 of 1D7B4[NKG2D]_H1.14 and SEQ ID NOS: 23, 24, and 26 for vlCDR1-3; SEQ ID NOS: 17-18 and 1240 for vhCDR1-3 of 1D7B4[NKG2D]_H1.15 and SEQ ID NOS: 23, 24, and 26 for vlCDR1-3; SEQ ID NOS: 17-18 and 1242 for vhCDR1-3 of 1D7B4[NKG2D]_H1.16 and SEQ ID NOS: 23, 24, and 26 for vlCDR1-3; SEQ ID NOS: 17-18 and 1244 for vhCDR1-3 of 1D7B4[NKG2D]_H1.17 and SEQ ID NOS: 23, 24, and 26 for vlCDR1-3; SEQ ID NOS: 17-18 and 1246 for vhCDR1-3 of 1D7B4[NKG2D]_H1.18 and SEQ ID NOS: 23, 24, and 26 for vlCDR1-3; SEQ ID NOS: 17-18 and 1248 for vhCDR1-3 of 1D7B4[NKG2D]_H1.19 and SEQ ID NOS: 23, 24, and 26 for vlCDR1-3; SEQ ID NOS: 17-18 and 1250 for vhCDR1-3 of 1D7B4[NKG2D]_H1.20 and SEQ ID NOS: 23, 24, and 26 for vlCDR1-3; SEQ ID NOS: 17-18 and 1252 for vhCDR1-3 of 1D7B4[NKG2D]_H1.21 and SEQ ID NOS: 23, 24, and 26 for vlCDR1-3; SEQ ID NOS: 17-18 and 1254 for vhCDR1-3 of 1D7B4[NKG2D]_H1.22 and SEQ ID NOS: 23, 24, and 26 for vlCDR1-3; SEQ ID NOS: 17-18 and 1258 for vhCDR1-3 of 1D7B4[NKG2D]_H1.24 and SEQ ID NOS: 23, 24, and 26 for vlCDR1-3; SEQ ID NOS: 17-18 and 1260 for vhCDR1-3 of 1D7B4[NKG2D]_H1.25 and SEQ ID NOS: 23, 24, and 26 for vlCDR1-3; SEQ ID NOS: 17-18 and 1262 for vhCDR1-3 of 1D7B4[NKG2D]_H1.26 and SEQ ID NOS: 23, 24, and 26 for vlCDR1-3; SEQ ID NOS: 17-18 and 1264 for vhCDR1-3 of 1D7B4[NKG2D]_H1.27 and SEQ ID NOS: 23, 24, and 26 for vlCDR1-3; SEQ ID NOS: 17-18 and 1266 for vhCDR1-3 of 1D7B4[NKG2D]_H1.28 and SEQ ID NOS: 23, 24, and 26 for vlCDR1-3; SEQ ID NOS: 17-18 and 1268 for vhCDR1-3 of 1D7B4[NKG2D]_H1.29 and SEQ ID NOS: 23, 24, and 26 for vlCDR1-3; SEQ ID NOS: 17-18 and 1270 for vhCDR1-3 of 1D7B4[NKG2D]_H1.30 and SEQ ID NOS: 23, 24, and 26 for vlCDR1-3; SEQ ID NOS: 17-18 and 1274 for vhCDR1-3 of 1D7B4[NKG2D]_H1.32 and SEQ ID NOS: 23, 24, and 26 for vlCDR1-3; SEQ ID NOS: 17-18 and 1276 for vhCDR1-3 of 1D7B4[NKG2D]_H1.33 and SEQ ID NOS: 23, 24, and 26 for vlCDR1-3; SEQ ID NOS: 17-18 and 1278 for vhCDR1-3 of 1D7B4[NKG2D]_H1.34 and SEQ ID NOS: 23, 24, and 26 for vlCDR1-3; SEQ ID NOS: 17-18 and 1280 for vhCDR1-3 of 1D7B4[NKG2D]_H1.35 and SEQ ID NOS: 23, 24, and 26 for vlCDR1-3; SEQ ID NOS: 17-18 and 1282 for vhCDR1-3 of 1D7B4[NKG2D]_H1.36 and SEQ ID NOS: 23, 24, and 26 for vlCDR1-3; SEQ ID NOS: 17-18 and 1284 for vhCDR1-3 of 1D7B4[NKG2D]_H1.37 and SEQ ID NOS: 23, 24, and 26 for vlCDR1-3; SEQ ID NOS: 17-18 and 1286 for vhCDR1-3 of 1D7B4[NKG2D]_H1.38 and SEQ ID NOS: 23, 24, and 26 for vlCDR1-3; SEQ ID NOS: 17-18 and 1288 for vhCDR1-3 of 1D7B4[NKG2D]_H1.39 and SEQ ID NOS: 23, 24, and 26 for vlCDR1-3; SEQ ID NOS: 17-18 and 1290 for vhCDR1-3 of 1D7B4[NKG2D]_H1.40 and SEQ ID NOS: 23, 24, and 26 for vlCDR1-3; SEQ ID NOS: 17-18 and 1292 for vhCDR1-3 of 1D7B4[NKG2D]_H1.41 and SEQ ID NOS: 23, 24, and 26 for vlCDR1-3; SEQ ID NOS: 17-18 and 1294 for vhCDR1-3 of 1D7B4[NKG2D]_H1.42 and SEQ ID NOS: 23, 24, and 26 for vlCDR1-3; SEQ ID NOS: 17-18 and 1296 for vhCDR1-3 of 1D7B4[NKG2D]_H1.43 and SEQ ID NOS: 23, 24, and 26 for vlCDR1-3; SEQ ID NOS: 17-18 and 1298 for vhCDR1-3 of 1D7B4[NKG2D]_H1.44 and SEQ ID NOS: 23, 24, and 26 for vlCDR1-3; SEQ ID NOS: 17-18 and 1300 for vhCDR1-3 of 1D7B4[NKG2D]_H1.45 and SEQ ID NOS: 23, 24, and 26 for vlCDR1-3; SEQ ID NOS: 17-18 and 1302 for vhCDR1-3 of 1D7B4[NKG2D]_H1.46 and SEQ ID NOS: 23, 24, and 26 for vlCDR1-3; SEQ ID NOS17-18 and 1304 for vhCDR1-3 of 1D7B4[NKG2D]_H1.47 and SEQ ID NOS: 23, 24, and 26 for vlCDR1-3; and SEQ ID NOS: 17-18 and 1306 for vhCDR1-3 of 1D7B4[NKG2D]_H1.48 and SEQ ID NOS: 23, 24, and 26 for vlCDR1-3, as depicted in FIGS. 23 and 58.

[0120] In certain aspects, described herein is a composition comprising an NKG2D antigen binding domain, wherein the NKG2D antigen binding domain comprises a variable heavy domain and variable light domain pair selected from the group consisting of SEQ ID NOS: 1255 and 51 of 1D7B4[NKG2D]_H1.23_L1; SEQ ID NOS: 1271 and 51 of 1D7B4[NKG2D]_H1.31_L1; SEQ ID NOS: 1211 and 51 of 1D7B4[NKG2D]_H1.1_L1; SEQ ID NOS: 1213 and 51 of 1D7B4[NKG2D]_H1.2_L1; SEQ ID NOS: 1215 and 51 of 1D7B4[NKG2D]_H1.3_L1; SEQ ID NOS: 1217 and 51 of 1D7B4[NKG2D]_H1.4_L1; SEQ ID NOS: 1219 and 51 of 1D7B4[NKG2D]_H1.5_L1; SEQ ID NOS: 1221 and 51 of 1D7B4[NKG2D]_H1.6_L1; SEQ ID NOS: 1223 and 51 of 1D7B4[NKG2D]_H1.7_L1; SEQ ID NOS: 1225 and 51 of 1D7B4[NKG2D]_H1.8_L1; SEQ ID NOS: 1227 and 51 of 1D7B4[NKG2D]_H1.9_L1; SEQ ID NOS: 1229 and 51 of 1D7B4[NKG2D]_H1.10_L1; SEQ ID NOS: 1231 and 51 of 1D7B4[NKG2D]_H1.11_L1; SEQ ID NOS: 1233 and 51 of 1D7B4[NKG2D]_H1.12_L1; SEQ ID NOS: 1235 and 51 of 1D7B4[NKG2D]_H1.13_L1; SEQ ID NOS: 1237 and 51 of 1D7B4[NKG2D]_H1.14_L1; SEQ ID NOS: 1239 and 51 of 1D7B4[NKG2D]_H1.15_L1; SEQ ID NOS: 1241 and 51 of 1D7B4[NKG2D]_H1.16_L1; SEQ ID NOS: 1243 and 51 of 1D7B4[NKG2D]_H1.17_L1; SEQ ID NOS: 1245 and 51 of 1D7B4[NKG2D]_H1.18_L1; SEQ ID NOS: 1247 and 51 of 1D7B4[NKG2D]_H1.19_L1; SEQ ID NOS: 1249 and 51 of 1D7B4[NKG2D]_H1.20_L1; SEQ ID NOS: 1251 and 51 of 1D7B4[NKG2D]_H1.21_L1; SEQ ID NOS: 1253 and 51 of 1D7B4[NKG2D]_H1.22_L1; SEQ ID NOS: 1257 and 51 of 1D7B4[NKG2D]_H1.24_L1; SEQ ID NOS: 1259 and 51 of 1D7B4[NKG2D]_H1.25_L1; SEQ ID NOS: 1261 and 51 of 1D7B4[NKG2D]_H1.26_L1; SEQ ID NOS: 1263 and 51 of 1D7B4[NKG2D]_H1.27_L1; SEQ ID NOS: 1265 and 51 of 1D7B4[NKG2D]_H1.28_L1; SEQ ID NOS: 1267 and 51 of 1D7B4[NKG2D]_H1.29_L1; SEQ ID NOS: 1269 and 51 of 1D7B4[NKG2D]_H1.30_L1; SEQ ID NOS: 1273 and 51 of 1D7B4[NKG2D]_H1.32_L1; SEQ ID NOS: 1275 and 51 of 1D7B4[NKG2D]_H1.33_L1; SEQ ID NOS: 1277 and 51 of 1D7B4[NKG2D]_H1.34_L1; SEQ ID NOS: 1279 and 51 of 1D7B4[NKG2D]_H1.35_L1; SEQ ID NOS: 1281 and 51 of 1D7B4[NKG2D]_H1.36_L1; SEQ ID NOS: 1283 and 51 of 1D7B4[NKG2D]_H1.37_L1; SEQ ID NOS: 1285 and 51 of 1D7B4[NKG2D]_H1.38_L1; SEQ ID NOS: 1287 and 51 of 1D7B4[NKG2D]_H1.39_L1; SEQ ID NOS: 1289 and 51 of 1D7B4[NKG2D]_H1.40_L1; SEQ ID NOS: 1291 and 51 of 1D7B4[NKG2D]_H1.41_L1; SEQ ID NOS: 1293 and 51 of 1D7B4[NKG2D]_H1.42_L1; SEQ ID NOS: 1295 and 51 of 1D7B4[NKG2D]_H1.43_L1; SEQ ID NOS: 1297 and 51 of 1D7B4[NKG2D]_H1.44_L1; SEQ ID NOS: 1299 and 51 of 1D7B4[NKG2D]_H1.45_L1; SEQ ID NOS: 1301 and 51 of 1D7B4[NKG2D]_H1.46_L1; SEQ ID NOS: 1303 and 51 of 1D7B4[NKG2D]_H1.47_L1; and SEQ ID NOS: 1305 and 51 of 1D7B4[NKG2D]_H1.48_L1, as depicted in FIGS. 23 and 58.

[0121] In yet other aspects, provided herein is an antibody comprising any NKG2D antigen binding domain described herein. In some embodiments, the antibody is a monoclonal antibody.

[0122] In many embodiments, the antibody is a bispecific antibody.

[0123] In some aspects, provided herein is a nucleic acid composition comprising (a) a first nucleic acid encoding the any one of the variable heavy domains described; and (b) a second nucleic acid encoding the any one of the variable light domains described.

[0124] In other aspects, provided herein is an expression vector composition comprising (a) a first expression vector comprising any first nucleic acid described; and (b) a second expression vector comprising any second nucleic acid described.

[0125] In some embodiments, provided herein is a host cell comprising any one of the expression vector compositions described.

[0126] In some embodiments, provided herein is a method of making an NKG2D antigen binding domain or an antibody comprising such comprising culturing a host cell described under conditions, wherein the NKG2D binding domain or an antibody thereof is expressed, and recovering the NKG2D antigen binding domain or the antibody comprising such.

[0127] In some aspects, described herein is a method of treating cancer or reducing tumor growth or inhibiting cancer cell proliferation in a subject in need thereof comprising administering to the subject a therapeutically effective amount of any of the compositions described, or any of the antibodies described or an antigen binding fragments thereof to the subject.

[0128] In some aspects, described herein is a method of treating cancer or reducing tumor growth or inhibiting cancer cell proliferation in a subject in need thereof comprising administering to the subject a therapeutically effective amount of any of the heterodimeric antibodies described or antigen binding fragments thereof to the subject.

[0129] In some embodiments, the method further comprises administering an IL-12-Fc fusion protein and/or an IL-15-Fc fusion protein to the subject. In some embodiments, the IL-12-Fc fusion protein comprises amino acid sequences of SEQ ID NOS:166 and 167 or amino acid sequences of SEQ ID NOS:168 and 169. In some embodiments, the IL-15-Fc fusion protein comprises amino acid sequences of SEQ ID NOS:164 and 165 or amino acid sequences of SEQ ID NOS:1077 and 1078.

[0130] In some embodiments, the method further comprises administering a bispecific T-cell engager antibody or an antigen binding fragment thereof to the subject. In some embodiments, the bispecific T-cell engager antibody or antigen binding fragment thereof is a heterodimeric antibody that binds to B7H3 and CD3 or an antigen binding fragment thereof.

[0131] In yet another aspect, provided herein is a method of selectively killing cancer cells in a population of cells comprising: a) contacting the population of cells with any one of the heterodimeric antibodies described herein, or an antigen binding fragments thereof, and b) contacting the population of cells with an IL-15-Fc fusion protein and/or an IL-12-Fc fusion protein. In some embodiments, the IL-12-Fc fusion protein comprises amino acid sequences of SEQ ID NOS:166 and 167 or amino acid sequences of SEQ ID NOS:168 and 169. In some embodiments, the IL-15-Fc fusion protein comprises amino acid sequences of SEQ ID NOS:164 and 165 or amino acid sequences of SEQ ID NOS:1077 and 1078.

[0132] In some embodiments, the subject is a human subject. In some embodiments, the human subject has cancer, was diagnosed with cancer, or has at least one symptom associated with cancer.

### BRIEF DESCRIPTION OF DRAWINGS

[0133] The novel features of the invention are set forth with particularity in the appended claims. A better understanding of the features and advantages of the present invention will be obtained by reference to the following detailed description that sets forth illustrative embodiments, in which the principles of the invention are utilized, and the accompanying drawings (also “Fig.”, “FIG.,” “Figure,” “Figures,”, “Figs.,” and “FIGs.” herein) of which:

[0134] FIGS. 1A-1E depict useful pairs of Fc heterodimerization variant sets (including skew and pI variants). There are variants for which there are no corresponding “monomer 2” variants; these are pI variants which can be used alone on either monomer.

[0135] FIG. 2 depicts a list of isosteric variant antibody constant regions and their respective substitutions. pI_(−) indicates lower pI variants, while pI_(+) indicates higher pI variants. These can be optionally and independently combined with other heterodimerization variants of the inventions (and other variant types as well, as outlined herein).

[0136] FIG. 3 depicts useful ablation variants that ablate FcγR binding (sometimes referred to as “knock outs” or “KO” variants). Generally, ablation variants are found on both monomers, although in some cases they may be on only one monomer.

[0137] FIG. 4 depicts particularly useful embodiments of “non-Fv” components of the invention.

[0138] FIG. 5 depicts a number of charged scFv linkers that find use in increasing or decreasing the pI of the subject heterodimeric bsAbs that utilize one or more scFv as a component, as described herein. The (+H) positive linker finds particular use herein, particularly with anti-CD3 V_{L} and V_{H} sequences shown herein. A single prior art scFv linker with a single charge is referenced as “Whitlow”, from Whitlow et al., Protein Engineering 6(8):989-995 (1993). It should be noted that this linker was used for reducing aggregation and enhancing proteolytic stability in scFvs. Such charged scFv linkers can be used in any of the subject antibody formats disclosed herein that include scFvs (e.g., 1+1 Fab-scFv-Fc and 2+1 Fab₂-scFv-Fc formats).

[0139] FIG. 6 depicts a number of exemplary domain linkers. In some embodiments, these linkers find use linking a single-chain Fv to an Fc chain. In some embodiments, these linkers may be combined. For example, a (G)₄S (SEQ ID NO:109) linker may be combined with a “half hinge” linker.

[0140] FIGS. 7A-7C depict the sequences of heterodimeric αB7H3×αNKG2D 1+1 Fab-scFv-Fc bispecific antibody format heavy chain backbones with ablated effector function, also referred to as the FcKO variants. Backbone 1 is based on human IgG1 (356E/358M allotype), and includes the S364K/E357Q:L368D/K370S skew variants, C220S on the chain with the S364K/E357Q skew variants, the N208D/Q295E/N384D/Q418E/N421D pI variants on the chain with L368D/K370S skew variants and the E233P/L234V/L235A/G236del/S267K ablation variants on both chains. Backbone 2 is based on human IgG1 (356E/358M allotype), and includes S364K:L368D/K370S skew variants, C220S on the chain with the S364K skew variant, the N208D/Q295E/N384D/Q418E/N421D pI variants on the chain with L368D/K370S skew variants, and the E233P/L234V/L235A/G236del/S267K ablation variants on both chains. Backbone 3 is based on human IgG1 (356E/358M allotype), and includes S364K:L368E/K370S skew variants, C220S on the chain with the S364K skew variant, the N208D/Q295E/N384D/Q418E/N421D pI variants on the chain with L368E/K370S skew variants and the E233P/L234V/L235A/G236del/S267K ablation variants on both chains. Backbone 4 is based on human IgG1 (356E/358M allotype), and includes D401K:K360E/Q362E/T411E skew variants, C220S on the chain with the D401K skew variant, the N208D/Q295E/N384D/Q418E/N421D pI variants on the chain with K360E/Q362E/T411E skew variants and the E233P/L234V/L235A/G236del/S267K ablation variants on both chains. Backbone 5 is based on human IgG1 (356D/358L allotype), and includes S364K/E357Q:L368D/K370S skew variants, C220S on the chain with the S364K/E357Q skew variants, the N208D/Q295E/N384D/Q418E/N421D pI variants on the chain with L368D/K370S skew variants and the E233P/L234V/L235A/G236del/S267K ablation variants on both chains. Backbone 6 is based on human IgG1 (356E/358M allotype), and includes S364K/E357Q:L368D/K370S skew variants, C220S on the chain with the S364K/E357Q skew variants, N208D/Q295E/N384D/Q418E/N421D pI variants on the chain with L368D/K370S skew variants and the E233P/L234V/L235A/G236del/S267K ablation variants on both chains, as well as an N297A variant on both chains. Backbone 7 is identical to 6 except the mutation is N297S. Backbone 8 is based on human IgG4, and includes the S364K/E357Q:L368D/K370S skew variants, the N208D/Q295E/N384D/Q418E/N421D pI variants on the chain with L368D/K370S skew variants, as well as a S228P (EU numbering, this is S241P in Kabat) variant on both chains that ablates Fab arm exchange as is known in the art. Backbone 9 is based on human IgG2, and includes the S364K/E357Q:L368D/K370S skew variants, the N208D/Q295E/N384D/Q418E/N421D pI variants on the chain with L368D/K370S skew variants. Backbone 10 is based on human IgG2, and includes the S364K/E357Q:L368D/K370S skew variants, the N208D/Q295E/N384D/Q418E/N421D pI variants on the chain with L368D/K370S skew variants as well as a S267K variant on both chains. Backbone 11 is identical to backbone 1, except it includes M428L/N434S Xtend mutations. Backbone 12 is based on human IgG1 (356E/358M allotype), and includes S364K/E357Q:L368D/K370S skew variants, C220S and the P217R/P229R/N276K pI variants on the chain with S364K/E357Q skew variants and the E233P/L234V/L235A/G236del/S267K ablation variants on both chains. Included within each of these backbones are sequences that are 90, 95, 98 and 99% identical (as defined herein) to the recited sequences, and/or contain from 1, 2, 3, 4, 5, 6, 7, 8, 9 or 10 additional amino acid substitutions (as compared to the “parent” of the Figure, which, as will be appreciated by those in the art, already contain a number of amino acid modifications as compared to the parental human IgG1 (or IgG2 or IgG4, depending on the backbone). That is, the recited backbones may contain additional amino acid modifications (generally amino acid substitutions) in addition to the skew, pI and ablation variants contained within the backbones of this figure.

[0141] FIGS. 8A-8C depict the sequences of several useful 2+1 Fab₂-scFv-Fc bispecific antibody format heavy chain backbones based on human IgG1, without the Fv sequences (e.g., the scFv and the V_{H} for the Fab side). Backbone 1 is based on human IgG1 (356E/358M allotype), and includes the S364K/E357Q:L368D/K370S skew variants, the N208D/Q295E/N384D/Q418E/N421D pI variants on the chain with L368D/K370S skew variants and the E233P/L234V/L235A/G236del/S267K ablation variants on both chains. Backbone 2 is based on human IgG1 (356E/358M allotype), and includes S364K:L368D/K370S skew variants, the N208D/Q295E/N384D/Q418E/N421D pI variants on the chain with L368D/K370S skew variants, and the E233P/L234V/L235A/G236del/S267K ablation variants on both chains. Backbone 3 is based on human IgG1 (356E/358M allotype), and includes S364K:L368E/K370S skew variants, the N208D/Q295E/N384D/Q418E/N421D pI variants on the chain with L368E/K370S skew variants and the E233P/L234V/L235A/G236del/S267K ablation variants on both chains. Backbone 4 is based on human IgG1 (356E/358M allotype), and includes D401K: K360E/Q362E/T411E skew variants, the N208D/Q295E/N384D/Q418E/N421D pI variants on the chain with K360E/Q362E/T411E skew variants and the E233P/L234V/L235A/G236del/S267K ablation variants on both chains. Backbone 5 is based on human IgG1 (356D/358L allotype), and includes S364K/E357Q:L368D/K370S skew variants, the N208D/Q295E/N384D/Q418E/N421D pI variants on the chain with L368D/K370S skew variants and the E233P/L234V/L235A/G236del/S267K ablation variants on both chains. Backbone 6 is based on human IgG1 (356E/358M allotype), and includes S364K/E357Q:L368D/K370S skew variants, N208D/Q295E/N384D/Q418E/N421D pI variants on the chain with L368D/K370S skew variants and the E233P/L234V/L235A/G236del/S267K ablation variants on both chains, as well as an N297A variant on both chains. Backbone 7 is identical to 6 except the mutation is N297S. Backbone 8 is identical to backbone 1, except it includes M428L/N434S Xtend mutations. Backbone 9 is based on human IgG1 (356E/358M allotype), and includes S364K/E357Q:L368D/K370S skew variants, the P217R/P229R/N276K pI variants on the chain with S364K/E357Q skew variants and the E233P/L234V/L235A/G236del/S267K ablation variants on both chains. Included within each of these backbones are sequences that are 90, 95, 98 and 99% identical (as defined herein) to the recited sequences, and/or contain from 1, 2, 3, 4, 5, 6, 7, 8, 9 or 10 additional amino acid substitutions (as compared to the “parent” of the Figure, which, as will be appreciated by those in the art, already contain a number of amino acid modifications as compared to the parental human IgG1 (or IgG2 or IgG4, depending on the backbone). That is, the recited backbones may contain additional amino acid modifications (generally amino acid substitutions) in addition to the skew, pI and ablation variants contained within the backbones of this figure.

[0142] FIG. 9 depicts illustrative sequences of heterodimeric αNKG2D×αB7H3 backbone for use in the 2+1 mAb-scFv format. The format depicted here is based on heterodimeric Fc backbone 1 as depicted in the figures including FIG. 35, except further including G446_ on monomer 1 (−) and G446_/K447_ on monomer 2 (+). It should be noted that any of the additional backbones depicted in FIG. 35 may be adapted for use in the 2+1 mAb-scFv format with or without including K447_ on one or both chains. It should be noted that these sequences may further include the M428L/N434S or M428L/N434A variants.

[0143] FIG. 10 depicts the sequences of several useful constant light domain backbones based on human IgG1, without the Fv sequences (e.g., the scFv or the Fab). Included herein are constant light backbone sequences that are 90, 95, 98 and 99% identical (as defined herein) to the recited sequences, and/or contain from 1, 2, 3, 4, 5, 6, 7, 8, 9 or 10 additional amino acid modifications.

[0144] FIG. 11 depicts sequences for human & cynomolgus NKG2D antigens.

[0145] FIGS. 12A-12B depict sequences for human, mouse, and cynomolgus B7H3.

[0146] FIG. 13 depicts the variable heavy and variable light chain sequences for humanized 38E2, as well as 6A1, both exemplary rabbit hybridoma-derived B7H3 binding domain. CDRs are underlined and slashes indicate the border(s) between the variable regions and constant domain. As noted herein and is true for every sequence herein containing CDRs, the exact identification of the CDR locations may be slightly different depending on the numbering used as is shown in Table 2 and thus included herein are not only the CDRs that are underlined but also CDRs included within the V_{H} and V_{L} domains using other numbering systems. Furthermore, as for all the sequences in the Figures, these V_{H} and V_{L} sequences can be used either in a scFv format or in a Fab format.

[0147] FIG. 14 depicts the variable heavy and variable light chain sequences for 2E4A3.189, an exemplary phage-derived B7H3 binding domain, as well as the sequences for affinity-optimized variable heavy 2E4A3.189_H1.22, and XENP38571, a bivalent antibody having a 2E4A3.189_H1.22 B7H3 binding domain. CDRs are underlined and slashes indicate the border(s) between the variable regions and constant domain. As noted herein and is true for every sequence herein containing CDRs, the exact identification of the CDR locations may be slightly different depending on the numbering used as is shown in Table 2, and thus included herein are not only the CDRs that are underlined but also CDRs included within the V_{H} and V_{L} domains using other numbering systems. Furthermore, as for all the sequences in the Figures, these V_{H} and V_{L} sequences can be used either in a scFv format or in a Fab format.

[0148] FIGS. 15A-15D depict several formats of the present invention as utilized in NK cell engaging antibodies. FIG. 15A depicts the “1+1 Fab-scFv-Fc” format, which comprises a first monomer comprising a first heavy chain variable region (VH1) covalently attached to the N-terminus of a first heterodimeric Fc backbone (optionally via a linker), a second monomer comprising a single-chain Fv covalently attached to the N-terminus of a second corresponding heterodimeric Fc backbone (optionally via a linker), and a third monomer comprising a light chain variable region covalently to a light chain constant domain, wherein the light chain variable region is complementary to the VH1. In this format, the Fab arm binds Antigen #1 and a second scFv arm binds Antigen #2. In one embodiment Antigen #1 is B7H3 and Antigen #2 is NKG2D. In another embodiment Antigen #1 is NKG2D and Antigen #2 is B7H3. FIG. 15B depicts the “2+1 Fab₂-scFv-Fc” format, with a first Fab arm and a second Fab-scFv arm, wherein the Fab binds B7H3 and the scFv binds NKG2D. The 2+1 Fab₂-scFv-Fc format comprises a first monomer comprising a first heavy chain variable region (VH1) covalently attached to the N-terminus of a first heterodimeric Fc backbone (optionally via a linker), a second monomer comprising the VH1 covalently attached (optionally via a linker) to a single-chain Fv covalently attached (optionally via a linker) to the N-terminus of a second corresponding heterodimeric Fc backbone, and a third monomer comprising a light chain variable region covalently to a light chain constant domain, wherein the light chain variable region is complementary to the VH1. FIG. 15C depicts the “2+1 mAb-scFv” format, with a first Fc comprising an N-terminal Fab arm binding B7H3 and a second Fc comprising an N-terminal Fab arm binding B7H3 and a C-terminal scFv binding NKG2D. The 2+1 mAb-scFv format comprises a first monomer comprising VH1-CH1-hinge-CH2-CH3, a second monomer comprising VH1-CH1-hinge-CH2-CH3-scFv, and a third monomer comprising V_{L}-C_{L}. The V_{L} pairs with the first and second VH1 to form binding domains with binding specificity for the tumor-associated antigen. Lastly, FIG. 15D depicts the “stackFab2-scFv-Fc” format which comprises a first monomer comprising from N-terminal to C-terminal VH1-CH1-linker-VH2-CH1-hinge-CH2-CH3 wherein CH2-CH3 is a first heterodimeric Fc domain; a second monomer comprising from N-terminal to C-terminal scFv-linker-CH2-CH3 wherein CH2-CH3 is a second heterodimeric Fc domain complementary to the first heterodimeric Fc domain and wherein the scFv has a first antigen specificity; and a third monomer that is a common light chain comprising from N-terminal to C-terminal V_{L}-C_{L} wherein the V_{L} pairs with VH1 and VH2 of the first monomer to form two antigen binding domains each having a specificity for a second antigen binding domain.

[0149] FIG. 16 depicts illustrations of NK engagers inducing both NK cell activation and T cell co-stimulation.

[0150] FIG. 17 depicts the monovalent binding affinities (K_{D}) of various B7H3 binding domains in the context of 1+1 bispecific formats.

[0151] FIG. 18 depicts an exemplary backbone having the S239D/I332E variants (also referred to as v90 variants) that result in improved binding to FcγRIIIa (CD16a) and increased levels of ADCC activity. It should be noted that the S239D/I332E variants may be used in any of the antibody formats or backbones described herein.

[0152] FIGS. 19A-19D depict the sequences for illustrative αNKG2D×αB7H3 bsAbs in the 1+1 Fab-scFv-Fc format. CDRs are underlined and slashes indicate the border(s) between the variable regions, linkers, Fc regions, and constant domains. It should be noted that the αNKG2D×αB7H3 bsAbs can utilize variable region, Fc region, and constant domain sequences that are 90, 95, 98 and 99% identical (as defined herein), and/or contain from 1, 2, 3, 4, 5, 6, 7, 8, 9 or 10 amino acid substitutions. In addition, each sequence outlined herein can include or exclude the M428L/N434S variants in one or preferably both Fc domains, which results in longer half-life in serum.

[0153] FIG. 20 depicts the sequences for illustrative αNKG2D×αB7H3 bsAbs in the 2+1 Fab₂-scFv-Fc format. CDRs are underlined and slashes indicate the border(s) between the variable regions, linkers, Fc regions, and constant domains. The scFv domain has orientation (N- to C-terminus) of V_{H}-scFv linker-V_{L}, although this can be reversed. It should be noted that the scFv domain includes an scFv linker between the variable heavy and variable light region the sequence GKPGSGKPGSGKPGSGKPGS (SEQ ID NO: 96); however, this linker can be replaced with any of the scFv linkers in FIG. 5. It should also be noted that the Chain 2 sequences include as the domain linker between the C-terminus of the scFv and the N-terminus of the CH2 domain the sequence GGGGSGGGGS (SEQ ID NO: 110) which is a “(GGGGS)₂” domain linker and the sequence KTHTCPPCP (SEQ ID NO: 126) which is a “lower half hinge” domain linker (collectively forming a “flex lower half hinge” (SEQ ID NO: 128); however, this linker can be replaced with any of the “useful domain linkers” of FIG. 6. It should be noted that the αNKG2D×αB7H3 bsAbs can utilize variable region, Fc region, and constant domain sequences that are 90, 95, 98 and 99% identical (as defined herein), and/or contain from 1, 2, 3, 4, 5, 6, 7, 8, 9 or 10 amino acid substitutions. In addition, each sequence outlined herein can include or exclude the M428L/N434S variants in one or preferably both Fc domains, which results in longer half-life in serum.

[0154] FIG. 21 depicts the sequence for an illustrative αNKG2D×αB7H3 bsAb in the 2+1 mAb-scFv format. CDRs are underlined and slashes indicate the border(s) between the variable regions, linkers, Fc regions, and constant domains. The scFv domain has orientation (N- to C-terminus) of V_{H}-scFv linker-V_{L}, although this can be reversed. It should be noted that the Chain 2 sequences include as a domain linker the sequence GGGGSGGGGSGGGGS (SEQ ID NO: 87); however, this linker can be replaced with any domain linker including any of the “useful domain linkers” of FIG. 5. It should be noted that the αNKG2D×αB7H3 bsAbs can utilize variable region, Fc region, and constant domain sequences that are 90, 95, 98 and 99% identical (as defined herein), and/or contain from 1, 2, 3, 4, 5, 6, 7, 8, 9 or 10 amino acid substitutions. In addition, each sequence outlined herein can include or exclude the M428L/N434S variants in one or preferably both Fc domains, which results in longer half-life in serum.

[0155] FIGS. 22A-22F depict sequences for illustrative IL-15-Fc fusion and IL-12-Fc fusion proteins. FIGS. 22A-22B depict sequences for illustrative IL-15-Fc fusion and IL-12-Fc fusion proteins that may be used in combination with αNKG2D×αB7H3 bsAbs to show a synergistic effect. FIGS. 22C-22D depict human IL-15 and its receptors. FIGS. 22E-22F depict the sequences for IL-12 and its receptors.

[0156] FIGS. 23A-23B depict variable heavy and variable light domains as well as CDRS for NKG2D binding clones 1D7B4, 1D2B4, mAb-C and mAb-D. As noted herein and is true for every sequence herein containing CDRs, the exact identification of the CDR locations may be slightly different depending on the numbering used as is shown in Table 2, and thus included herein are not only the CDRs that are underlined but also CDRs included within the V_{H} and V_{L} domains using other numbering systems. Furthermore, as for all the sequences in the Figures, these V_{H} and V_{L} sequences can be used either in a scFv format or in a Fab format.

[0157] FIG. 24 depicts that Fc engagement of CD16 is crucial for NK cell activation. In this assay, PBMCs were mixed with MCF7 cancer cells at a 40:1 ratio, which corresponds to approximately a 1:1 NK cell to MCF7 ratio. Cells were then treated with the one of the three XENPs at a range of concentrations as indicated in the figure and incubated for 4 hours. The XENPs used in this experiment had either normal binding to FcγRs (WT), ablated binding to FcγRs (KO), or enhanced binding to FcγRIIIa (v90). Flow cytometry was used to measure degranulation marker CD107a and activation marker CD69.

[0158] FIG. 25 depicts that NK cell engagers with 1D7B4 and 1D2B4 NKG2D binding domains show strong activation of NK cells. In this assay, PBMCs were mixed with MCF7 cancer cells at a 40:1 ratio, which corresponds to approximately a 1:1 NK cell to MCF7 ratio. Cells were then treated with the one of the three XENPS at a range of concentrations as indicated in the figure and incubated for 4 hours. Flow cytometry was used to measure degranulation marker CD107a and activation marker CD69.

[0159] FIGS. 26A-26D depict additional antibodies which may be referred to in the specification.

[0160] FIGS. 27A-27B depict the ability of NKG2D×B7H3 bsAbs to effectively kill target cells. In the experiment depicted in FIG. 27A, resting NK cells were co-cultured with MCF7-RFP tumor cells at an E:T ratio of 5:1. Treatments of either isotype control XENP40371 or NKG2D×B7H3 bsAb XENP40377 were added at a concentration of 4.6 ng/ml. MCF7 cell growth was assessed over time with Incucyte. In FIG. 27B, NK cells were also co-cultured with MCF7-RFP tumor cells, and treated with test articles at a range of concentrations. Tumor cell killing was then assessed after 24 hours.

[0161] FIG. 28 depicts that NKEs delivered as a single agent showed improved cell killing on MDA-MB-231 B2M knockout cells (right column) compared to parental MDA-MB-231 WT cells (left column). In this experiment, resting NK cells were co-cultured with MDA-MB-231 WT or MDA-MB-231 B2M knockout cells at a 5:1 E:T ratio. NKEs XENP38597 or XENP40377 were added at a range of 0.1 μg/ml to 10 μg/ml, and the target cell count was recorded over time by the Incucyte® system.

[0162] FIGS. 29A-29C depict that only XENP38597, and not the comparator molecules, was able to co-stimulate T cells to kill tumor cells. In this experiment, T cells were added to MCF7 target cells at a 5:1 E:T ratio. All cells were dosed at a constant concentration of 10 μg/ml of NKEs, while B7H3×CD3 bispecific XENP31346 was titrated in at doses ranging from 1.52 ng/ml to 10 μg/ml (as indicated at the top of each graph). One NKE used in this experiment was XENP38597, having a 1D7B4 NKG2D binding domain. The other two NKEs used were XENP38600 and XENP38601, which have the same format and B7H3 binding domain as XENP38597, but which use comparator NKG2D binding domains LB1001 and LB1002 instead. Incucyte was used to measure target cell viability every 6 hours over a span of 160 hours. FIG. 29B shows a close-up of the boxed graph in FIG. 29A. FIG. 29C shows a similar experiment with a different test article, XENP40735, having the 38E2 B7H3 arm instead of the 2E4, and comparing it to an RSV isotype control instead of a comparator test article. FIG. 29C depicts the effect over a range of concentrations instead of a range of time.

[0163] FIG. 30 depicts the ability of NKEs to synergize with IL-15 to enhance NKE activity. NK cells were added to MCF7 target cells at a 5:1 E:T ratio. A control group of cells was then left alone, while other groups were dosed with either IL15-Fc, NKG2D×B7H3 bsAb, or both. Target cell counts were then measured over time using the Incucyte® system. As seen in the figure, the combination of both IL15-Fc and NKE demonstrated significantly better target cell killing ability than either of the two treatments alone.

[0164] FIGS. 31A-31B depict the ability of NKEs to synergize with IL-12 to enhance NKE activity. In the experimental set up for FIG. 32A, NK cells were added to MCF7 target cells at a 5:1 E:T ratio. A control group of cells was then left alone, while other groups were dosed with either 10 μg/ml IL-12-Fc (XENP27201), 4 μg/ml NKG2D×B7H3 bsAb (XENP40377), or both. Target cell counts were then measured over time using the Incucyte® system. As seen in the figure, the combination of both IL-12-Fc and XENP40377 was significantly more effective at killing target cells than either of the two treatments alone. FIG. 31B depicts the results of a similar experimental set-up as described for FIG. 32A, but using 2 μg/ml IL-12-Fc XmAb662 (XENP39662) instead of 10 μg/ml XENP27201.

[0165] FIGS. 32A-32B depict the K_{D} values for NKG2D binding domains in the format of a bispecific antibody binding to both human NKG2D (FIG. 32A) and cynomolgus NKG2D (FIG. 32B). In this Octet experiment, HIS1K sensors were used to capture human NKG2D (XENP23311) or cynomolgus NKG2D (XENP23309) antigens at 20 nM for 3 minutes. Antigens were then dipped into a respective test article at concentrations of 300 nM, 150 nM, 75 nM, 37.5 nM, 18.75 nM, 9.38 nM, 4.69 nM, and 0 nM with an association time of 5 minutes and a dissociation time of 10 minutes.

[0166] FIG. 33 depicts the ability of NKEs, particularly those with 1D7B4 and 1D2B4 NKG2D binding domains, to synergize with IL-15 for target cell killing and titration response. In this experiment, NK cells were added to OVCAR8 target cells at a 5:1 E:T ratio. Cells were dosed with 10 μg/ml IL-15 Fc (XENP24045) and NKEs were titrated in at a dose range of 1.5 ng/ml to 10,000 μg/ml. Incucyte was used to quantify target cells over time.

[0167] FIG. 34 depicts useful Fc variants that increase FcγRIIIA binding and enhance ADCC activity. These variants may be used with or without Xtend variants (M428L/N434S or M428L/N434A).

[0168] FIGS. 35A-35D show the sequences of several heterodimeric αNKG2D×αB7H3 backbones with ablated effector function (also referred to as the FcKO variants). Heterodimeric Fc backbone 1 is based on human IgG1 (356E/358M allotype), and includes the L368D/K370S skew variants and the Q295E/N384D/Q418E/N421D pI variants on a first heterodimeric Fc chain, the S364K/E357Q skew variants on a second heterodimeric Fc chain, and the E233P/L234V/L235A/G236del/S267K ablation variants on both chains. Heterodimeric Fc backbone 2 is based on human IgG1 (356E/358M allotype), and includes the L368D/K370S skew variants and the Q295E/N384D/Q418E/N421D pI variants on a first heterodimeric Fc chain, the S364K skew variant on a second heterodimeric Fc chain, and the E233P/L234V/L235A/G236del/S267K ablation variants on both chains. Heterodimeric Fc backbone 3 is based on human IgG1 (356E/358M allotype), and includes the L368E/K370S skew variants and the Q295E/N384D/Q418E/N421D pI variants on a first heterodimeric Fc chain, the S364K skew variant on a second heterodimeric Fc chain, and the E233P/L234V/L235A/G236del/S267K ablation variants on both chains. Heterodimeric Fc backbone 4 is based on human IgG1 (356E/358M allotype), and includes the K360E/Q362E/T411E skew variants and the Q295E/N384D/Q418E/N421D pI variants on a first heterodimeric Fc chain, the D401K skew variant on a second heterodimeric Fc chain, and the E233P/L234V/L235A/G236del/S267K ablation variants on both chains. Heterodimeric Fc backbone 5 is based on human IgG1 (356D/358L allotype), and includes the L368D/K370S skew variants and the Q295E/N384D/Q418E/N421D pI variants on a first heterodimeric Fc chain, the S364K/E357Q skew variants on a second heterodimeric Fc chain, and the E233P/L234V/L235A/G236del/S267K ablation variants on both chains. Heterodimeric Fc backbone 6 is based on human IgG1 (356E/358M allotype), and includes the L368D/K370S skew variants and the Q295E/N384D/Q418E/N421D pI variants on a first heterodimeric Fc chain, the S364K/E357Q skew variants on a second heterodimeric Fc chain, and the E233P/L234V/L235A/G236del/S267K ablation variants and N297A variant that removes glycosylation on both chains. Heterodimeric Fc backbone 7 is based on human IgG1 (356E/358M allotype), and includes the L368D/K370S skew variants and the Q295E/N384D/Q418E/N421D pI variants on a first heterodimeric Fc chain, the S364K/E357Q skew variants on a second heterodimeric Fc chain, and the E233P/L234V/L235A/G236del/S267K ablation variants and N297S variant that removes glycosylation on both chains. Heterodimeric Fc backbone 8 is based on human IgG4, and includes the L368D/K370S skew variants and the Q295E/N384D/Q418E/N421D pI variants on a first heterodimeric Fc chain, the S364K/E357Q skew variants on a second heterodimeric Fc chain, and the S228P (according to EU numbering, S241P in Kabat) variant that ablates Fab arm exchange (as is known in the art) on both chains. Heterodimeric Fc backbone 9 is based on human IgG2, and includes the L368D/K370S skew variants and the Q295E/N384D/Q418E/N421D pI variants on a first heterodimeric Fc chain, the S364K/E357Q skew variants on a second heterodimeric Fc chain. Heterodimeric Fc backbone 10 is based on human IgG2, and includes the L368D/K370S skew variants and the Q295E/N384D/Q418E/N421D pI variants on a first heterodimeric Fc chain, the S364K/E357Q skew variants on a second heterodimeric Fc chain, and the S267K ablation variant on both chains. Heterodimeric Fc backbone 11 is based on human IgG1 (356E/358M allotype), and includes the L368D/K370S skew variants and the Q295E/N384D/Q418E/N421D pI variants on a first heterodimeric Fc chain, the S364K/E357Q skew variants on a second heterodimeric Fc chain, and the E233P/L234V/L235A/G236del/S267K ablation variants and M428L/N434S Xtend variants on both chains. Heterodimeric Fc backbone 12 is based on human IgG1 (356E/358M allotype), and includes the L368D/K370S skew variants on a first heterodimeric Fc chain, the S364K/E357Q skew variants and P217R/P229R/N276K pI variants on a second heterodimeric Fc chain, and the E233P/L234V/L235A/G236del/S267K ablation variants on both chains. Heterodimeric Fc backbone 13 is based on human IgG1 (356D/358L allotype), and includes the L368D/K370S skew variants and the Q295E/N384D/Q418E/N421D pI variants on a first heterodimeric Fc chain, the S364K/E357Q skew variants on a second heterodimeric Fc chain, and the E233P/L234V/L235A/G236del/S267K ablation variants and M428L/N434S Xtend variants on both chains. Heterodimeric Fc backbone 14 is based on human IgG1 (356E/358M allotype), and includes the L368D/K370S skew variants and the Q295E/N384D/Q418E/N421D pI variants on a first heterodimeric Fc chain, the S364K/E357Q skew variants on a second heterodimeric Fc chain, and the E233P/L234V/L235A/G236del/S267K ablation variants and M428L/N434A Xtend variants on both chains. Heterodimeric Fc backbone 15 is based on human IgG1 (356D/358L allotype), and includes the L368D/K370S skew variants and the Q295E/N384D/Q418E/N421D pI variants on a first heterodimeric Fc chain, the S364K/E357Q skew variants on a second heterodimeric Fc chain, and the E233P/L234V/L235A/G236del/S267K ablation variants and M428L/N434A Xtend variants on both chains.

[0169] Included within each of these backbones are sequences that are 90, 95, 98 and 99% identical (as defined herein) to the recited sequences, and/or contain from 1, 2, 3, 4, 5, 6, 7, 8, 9 or 10 additional amino acid substitutions (as compared to the “parent” of the Figure, which, as will be appreciated by those in the art, already contain a number of amino acid modifications as compared to the parental human IgG1 (or IgG2 or IgG4, depending on the backbone). That is, the recited backbones may contain additional amino acid modifications (generally amino acid substitutions) in addition or as an alternative to the skew, pI and ablation variants contained within the backbones of this Figure.

[0170] FIG. 36 depicts sequences for “CH1+hinge” that find use in embodiments of αNKG2D×αB7H3 bsAbs that utilize a Fab binding domain. The “CH1+hinge” sequences find use linking the variable heavy domain (V_{H}) to the Fc backbones depicted in FIG. 19. For particular embodiments wherein the Fab is on the (+) side, the “CH1(+)+hinge” sequences may find use. For particular embodiments wherein the Fab is on the (−) side, the “CH1(−)+hinge” sequences may find use.

[0171] FIG. 37 depicts sequences for “CH1+half hinge” domain linker that find use in embodiments of αNKG2D×αB7H3 bsAbs in the 2+1 Fab2-scFv-Fc format. In the 2+1 Fab2-scFv-Fc format, the “CH1+half hinge” sequences find use linking the variable heavy domain (V_{H}) to the scFv domain on the Fab-scFv-Fc side of the bispecific antibody. It should be noted that other linkers may be used in place of the “CH1+half hinge”. It should also be noted that although the sequences here are based on the IgG1 sequence, equivalents can be constructed based on the IgG2 or IgG4 sequences.

[0172] FIG. 38 depicts sequences for “CH1” that find use in embodiments of αNKG2D×αB7H3 bsAbs.

[0173] FIG. 39 depicts sequences for “hinge” that find use in embodiments of αNKG2D×αB7H3 bsAbs.

[0174] FIG. 40 depicts a matrix of symmetric and asymmetric v90 Fc variants that have been engineered, as well as the corresponding Tm data, affinity data, production yield, ADCC activity and target cell killing activity. As shown, each Fc monomer (−Fc HC or +Fc-scFv-Fc) has either the S239D and I332E (V90) variants, the S239D variant alone, the I332E variant alone, or is wild-type at the 239 and 332 positions; and each test article has a different combination of these Fc monomers.

[0175] FIG. 41 depicts the range of ADCC activity of the various symmetric and asymmetric V90 variants outlined in FIG. 40. The results show a large range in levels of fold change in ADCC activity of each construct compared to wildtype, (“WT”) with V90 having one of the highest fold changes in ADCC activity compared to WT, and the various S239D and I332E combinations showing a broad range of intermediate levels fold changes.

[0176] FIG. 42 depicts the affinity data for detuned 1D7B4 Fab variants.

[0177] FIG. 43 depicts the affinity data for select detuned 1D7B4 variants in the context of a αB7H3×αNKG2D 1+1 Fab-scFv-Fc.

[0178] FIGS. 44A-44B depict the NK cell killing and the NK cell degranulation by 1D7B4 detuned variants. FIG. 44A depicts the NK cell killing and the NK cell degranulation of 1D7B4 detuned variants. As seen, most of the detuned variants, with the exception of 1D7B4_H1.28 (XENP42660), showed a significant decrease in the amount of fratricide when compared to the parental XENP40377. FIG. 44B depicts the same effect with a smaller set of test articles. In this experiment, NK cells were co-cultured with treatments for 12 hours. NK cell lysis was assessed via staining with a viability dye, staining was quantified by flow cytometry.

[0179] FIGS. 45A-45C depict the ability αB7H3×αNKG2D 1+1 molecules having the affinity detuned 1D7B4 variants to induce target cell lysis and IFNγ production, with and without IL-15. In this experiment, parental A375 cells were plated, and effector cells were added at a 5:1 E:T ratio. Tumor cell growth was assessed using Incucyte. The IL15-Fc used was XENP24045.

[0180] FIG. 46 depicts the reduction of potency of fratricide when the NKE is in the scFv format. It also demonstrates that the extent of this reduction in fratricide is influenced by the level of CD16 expression on the NK cells.

[0181] FIG. 47 depicts the impact of different NKE antibody formats on their binding to NK cells and corresponding affinities.

[0182] FIG. 48 depicts the affinities of NKEs having NKG2D in either the V_{H}-V_{L} or the V_{L}-V_{H} orientation as well as in different antibody formats.

[0183] FIGS. 49A-49D depict the ability of NKEs to induce NK cell and CD8+ T cell activation in vivo. In this study, female huCD34+ NSG mice were inoculated intradermally with 3×106 ppMCF7-GFP cells per mouse on Day −16. Then on Day 0, they were dosed with a 5 mg/kg NKE treatment and a 0.2 mg/kg IL-15-Fc (XENP24045) treatments intraperitoneally. Activation marker CD69 is upregulated in NK cells and CD8+ T cells in groups treated with NKG2D×B7H3 NKEs but not in groups treated with RSV×B7H3 controls.

[0184] FIGS. 50A-50C show the sequences of several useful heterodimeric αB7H3×αNKG2D bsAb backbones based on human IgG1 and having WT effector function. Heterodimeric Fc backbone 1 is based on human IgG1 (356E/358M allotype), and includes the L368D/K370S skew variants and the Q295E/N384D/Q418E/N421D pI variants on a first heterodimeric Fc chain, the S364K/E357Q skew variants on a second heterodimeric Fc chain. Heterodimeric Fc backbone 2 is based on human IgG1 (356E/358M allotype), and includes the L368D/K370S skew variants and the Q295E/N384D/Q418E/N421D pI variants on a first heterodimeric Fc chain, the S364K skew variant on a second heterodimeric Fc chain. Heterodimeric Fc backbone 3 is based on human IgG1 (356E/358M allotype), and includes the L368E/K370S skew variants and the Q295E/N384D/Q418E/N421D pI variants on a first heterodimeric Fc chain, the S364K skew variant on a second heterodimeric Fc chain. Heterodimeric Fc backbone 4 is based on human IgG1 (356E/358M allotype), and includes the K360E/Q362E/T411E skew variants and the Q295E/N384D/Q418E/N421D pI variants on a first heterodimeric Fc chain, the D401K skew variant on a second heterodimeric Fc chain. Heterodimeric Fc backbone 5 is based on human IgG1 (356D/358L allotype), and includes the L368D/K370S skew variants and the Q295E/N384D/Q418E/N421D pI variants on a first heterodimeric Fc chain, the S364K/E357Q skew variants on a second heterodimeric Fc chain. Heterodimeric Fc backbone 6 is based on human IgG1 (356E/358M allotype), and includes the L368D/K370S skew variants and the Q295E/N384D/Q418E/N421D pI variants on a first heterodimeric Fc chain, the S364K/E357Q skew variants on a second heterodimeric Fc chain, and N297A variant that removes glycosylation on both chains. Heterodimeric Fc backbone 7 is based on human IgG1 (356E/358M allotype), and includes the L368D/K370S skew variants and the Q295E/N384D/Q418E/N421D pI variants on a first heterodimeric Fc chain, the S364K/E357Q skew variants on a second heterodimeric Fc chain, and N297S variant that removes glycosylation on both chains. Heterodimeric Fc backbone 8 is based on human IgG1 (356E/358M allotype), and includes the L368D/K370S skew variants and the Q295E/N384D/Q418E/N421D pI variants on a first heterodimeric Fc chain, the S364K/E357Q skew variants on a second heterodimeric Fc chain, and M428L/N434S Xtend variants on both chains. Heterodimeric Fc backbone 9 is based on human IgG1 (356D/358L allotype), and includes the L368D/K370S skew variants and the Q295E/N384D/Q418E/N421D pI variants on a first heterodimeric Fc chain, the S364K/E357Q skew variants on a second heterodimeric Fc chain, and the E233P/L234V/L235A/G236del/S267K ablation variants and M428L/N434S Xtend variants on both chains. Heterodimeric Fc backbone 10 is based on human IgG1 (356E/358M allotype), and includes the L368D/K370S skew variants and the Q295E/N384D/Q418E/N421D pI variants on a first heterodimeric Fc chain, the S364K/E357Q skew variants on a second heterodimeric Fc chain, and M428L/N434A Xtend variants on both chains. Heterodimeric Fc backbone 11 is based on human IgG1 (356D/358L allotype), and includes the L368D/K370S skew variants and the Q295E/N384D/Q418E/N421D pI variants on a first heterodimeric Fc chain, the S364K/E357Q skew variants on a second heterodimeric Fc chain, and M428L/N434A Xtend variants on both chains.

[0185] Included within each of these backbones are sequences that are 90, 95, 98 and 99% identical (as defined herein) to the recited sequences, and/or contain from 1, 2, 3, 4, 5, 6, 7, 8, 9 or 10 additional amino acid substitutions (as compared to the “parent” of the Figure, which, as will be appreciated by those in the art, already contain a number of amino acid modifications as compared to the parental human IgG1 (or IgG2 or IgG4, depending on the backbone). That is, the recited backbones may contain additional amino acid modifications (generally amino acid substitutions) in addition or as an alternative to the skew, pI and ablation variants contained within the backbones of this Figure. Additionally, the backbones depicted herein may include deletion of the C-terminal glycine (K446_) and/or lysine (K447_). The C-terminal glycine and/or lysine deletion may be intentionally engineered to reduce heterogeneity or in the context of certain bispecific formats, such as the mAb-scFv format. Additionally, C-terminal glycine and/or lysine deletion may occur naturally for example during production and storage.

[0186] FIGS. 51A-51C depict the sequences of several useful heterodimeric αB7H3×αNKG2D bsAb backbones based on human IgG1 and having enhanced ADCC function. The sequences here are based on heterodimeric Fc backbone 1 in FIG. 50, although the ADCC variants in FIG. 51 may also be included in any of the other heterodimeric Fc backbones in FIG. 50. ADCC-enhanced Heterodimeric Backbone 1 includes S239D/I332E on both the first and the second heterodimeric Fc chain. ADCC-enhanced Heterodimeric Backbone 2 includes S239D on both the first and the second heterodimeric Fc chain. ADCC-enhanced Heterodimeric Backbone 3 includes I332E on both the first and the second heterodimeric Fc chain. ADCC-enhanced Heterodimeric Backbone 4 includes S239D/I332E on the second heterodimeric Fc chain. ADCC-enhanced Heterodimeric Backbone 5 includes S239D on the second heterodimeric Fc chain. ADCC-enhanced Heterodimeric Backbone 6 includes I332E on the second heterodimeric Fc chain. ADCC-enhanced Heterodimeric Backbone 7 includes S239D/I332E on the first heterodimeric Fc chain. ADCC-enhanced Heterodimeric Backbone 8 includes S239D on the first heterodimeric Fc chain. ADCC-enhanced Heterodimeric Backbone 9 includes I332E on the first heterodimeric Fc chain. ADCC-enhanced Heterodimeric Backbone 10 includes S239D/I332E on the first heterodimeric Fc chain and S239D on the second heterodimeric Fc chain. ADCC-enhanced Heterodimeric Backbone 11 includes S239D/I332E on the first heterodimeric Fc chain and I332E on the second heterodimeric Fc chain. ADCC-enhanced Heterodimeric Backbone 12 includes S239D on the first heterodimeric Fc chain and S239D/I332E on the second heterodimeric Fc chain. ADCC-enhanced Heterodimeric Backbone 13 includes I332E on the first heterodimeric Fc chain and S239D/I332E on the second heterodimeric Fc chain. ADCC-enhanced Heterodimeric Backbone 14 includes S239D on the first heterodimeric Fc chain and I332E on the second heterodimeric Fc chain. ADCC-enhanced Heterodimeric Backbone 15 includes I332E on the first heterodimeric Fc chain and S239D on the second heterodimeric Fc chain.

[0187] Included within each of these backbones are sequences that are 90, 95, 98 and 99% identical (as defined herein) to the recited sequences, and/or contain from 1, 2, 3, 4, 5, 6, 7, 8, 9 or 10 additional amino acid substitutions (as compared to the “parent” of the Figure, which, as will be appreciated by those in the art, already contain a number of amino acid modifications as compared to the parental human IgG1. That is, the recited backbones may contain additional amino acid modifications (generally amino acid substitutions) in addition or as an alternative to the skew, pI and ablation variants contained within the backbones of this Figure. Additionally, the backbones depicted herein may include deletion of the C-terminal glycine (K446_) and/or lysine (K447_). The C-terminal glycine and/or lysine deletion may be intentionally engineered to reduce heterogeneity or in the context of certain bispecific formats, such as the mAb-scFv format. Additionally, C-terminal glycine and/or lysine deletion may occur naturally for example during production and storage.

[0188] FIGS. 52A-52C show the sequences of several useful heterodimeric αB7H3×αNKG2D bsAb backbones based on human IgG1 and having enhanced ADCC function and enhanced serum half-life. The sequences here are based on heterodimeric Fc backbone 8 in FIG. 35, although the ADCC variants in FIG. 34 may also be included in any of the other heterodimeric Fc backbones in FIG. 34. ADCC-enhanced Heterodimeric Backbone 1 with Xtend includes S239D/I332E on both the first and the second heterodimeric Fc chain. ADCC-enhanced Heterodimeric Backbone 2 with Xtend includes S239D on both the first and the second heterodimeric Fc chain. ADCC-enhanced Heterodimeric Backbone 3 with Xtend includes I332E on both the first and the second heterodimeric Fc chain. ADCC-enhanced Heterodimeric Backbone 4 with Xtend includes S239D/I332E on the second heterodimeric Fc chain. ADCC-enhanced Heterodimeric Backbone 5 with Xtend includes S239D on the second heterodimeric Fc chain. ADCC-enhanced Heterodimeric Backbone 6 with Xtend includes I332E on the second heterodimeric Fc chain. ADCC-enhanced Heterodimeric Backbone 7 with Xtend includes S239D/I332E on the first heterodimeric Fc chain. ADCC-enhanced Heterodimeric Backbone 8 with Xtend includes S239D on the first heterodimeric Fc chain. ADCC-enhanced Heterodimeric Backbone 9 with Xtend includes I332E on the first heterodimeric Fc chain. ADCC-enhanced Heterodimeric Backbone 10 with Xtend includes S239D/I332E on the first heterodimeric Fc chain and S239D on the second heterodimeric Fc chain. ADCC-enhanced Heterodimeric Backbone 11 with Xtend includes S239D/I332E on the first heterodimeric Fc chain and I332E on the second heterodimeric Fc chain. ADCC-enhanced Heterodimeric Backbone 12 with Xtend includes S239D on the first heterodimeric Fc chain and S239D/I332E on the second heterodimeric Fc chain. ADCC-enhanced Heterodimeric Backbone 13 with Xtend includes I332E on the first heterodimeric Fc chain and S239D/I332E on the second heterodimeric Fc chain. ADCC-enhanced Heterodimeric Backbone 14 with Xtend includes S239D on the first heterodimeric Fc chain and I332E on the second heterodimeric Fc chain. ADCC-enhanced Heterodimeric Backbone 15 with Xtend includes I332E on the first heterodimeric Fc chain and S239D on the second heterodimeric Fc chain.

[0189] Included within each of these backbones are sequences that are 90, 95, 98 and 99% identical (as defined herein) to the recited sequences, and/or contain from 1, 2, 3, 4, 5, 6, 7, 8, 9 or 10 additional amino acid substitutions (as compared to the “parent” of the Figure, which, as will be appreciated by those in the art, already contain a number of amino acid modifications as compared to the parental human IgG1. That is, the recited backbones may contain additional amino acid modifications (generally amino acid substitutions) in addition or as an alternative to the skew, pI and ablation variants contained within the backbones of this Figure. Additionally, the backbones depicted herein may include deletion of the C-terminal glycine (K446_) and/or lysine (K447_). The C-terminal glycine and/or lysine deletion may be intentionally engineered to reduce heterogeneity or in the context of certain bispecific formats, such as the mAb-scFv format. Additionally, C-terminal glycine and/or lysine deletion may occur naturally for example during production and storage.

[0190] FIGS. 53A-53G depict illustrative sequences of heterodimeric αB7H3×αNKG2D bsAb backbone for use in the 2+1 mAb-scFv format. The format depicted here is based on heterodimeric Fc backbone 1 as depicted in FIG. 35, except further including K447_ on monomer 2 (+). It should be noted that any of the additional backbones depicted in FIGS. 35 and 50-52 may be adapted for use in the 2+1 mAb-scFv format with or without including K447_ on one or both chains.

[0191] FIGS. 54A-54L depict the sequences of the engineered affinity detuned 1D7B4 ABDs in the format of a bivalent antibody. It should be noted that these ABDs can be used in any of the other formats of the invention.

[0192] FIGS. 55A-55H depict the set of ADCC enhanced Fc variants (or WT effector function as a control in the case of the control XENP41021) in the format of a B7H3 1+1 Fab-scFv Fc.

[0193] FIGS. 56A-56V depict additional sequences of the invention.

[0194] FIG. 57 depicts an exemplary αB7H3×αNKG2D antibody in the stackFab₂-scFv-Fc format. An exemplary embodiment of this αB7H3×αNKG2D bispecific antibody includes the amino acid sequences of chain 1 (SEQ ID NO:1209), chain 2 (SEQ ID NO:1210) and chain 3 (SEQ ID NO:6).

[0195] FIGS. 58A-58J depict the affinity detuned variable heavy domains of the anti-NKG2D 1D7B4 clone and their CDRs (as in Kabat). As noted herein and is true for every sequence herein containing CDRs, the exact identification of the CDR locations may be slightly different depending on the numbering used as is shown in Table 2, and thus included herein are not only the CDRs that are underlined but also CDRs included within the V_{H} and V_{L} domains using other numbering systems. Furthermore, as for all the sequences in the Figures, these V_{H} and V_{L} sequences can be used either in a scFv format or in a Fab format.

[0196] FIGS. 59A-59C depict the sequences for select detuned 1D7B4 variants in the 1+1 Fab-scFv-Fc format (with a B7H3 Fab and NKG2D scFv).

[0197] FIGS. 60A-60C show the sequences of several useful heterodimeric αB7H3×αNKG2D bsAb backbones based on human IgG1 and having enhanced ADCC function and alternate enhanced serum half-life variants 428L/434A. The sequences here are based on heterodimeric Fc backbone 8 in FIG. 51, although the ADCC variants in FIG. 34 may also be included in any of the other heterodimeric Fc backbones in FIG. 51. ADCC-enhanced Heterodimeric Backbone 1 with Xtend includes S239D/I332E on both the first and the second heterodimeric Fc chain. ADCC-enhanced Heterodimeric Backbone 2 with Xtend includes S239D on both the first and the second heterodimeric Fc chain. ADCC-enhanced Heterodimeric Backbone 3 with Xtend includes I332E on both the first and the second heterodimeric Fc chain. ADCC-enhanced Heterodimeric Backbone 4 with Xtend includes S239D/I332E on the second heterodimeric Fc chain. ADCC-enhanced Heterodimeric Backbone 5 with Xtend includes S239D on the second heterodimeric Fc chain. ADCC-enhanced Heterodimeric Backbone 6 with Xtend includes I332E on the second heterodimeric Fc chain. ADCC-enhanced Heterodimeric Backbone 7 with Xtend includes S239D/I332E on the first heterodimeric Fc chain. ADCC-enhanced Heterodimeric Backbone 8 with Xtend includes S239D on the first heterodimeric Fc chain. ADCC-enhanced Heterodimeric Backbone 9 with Xtend includes I332E on the first heterodimeric Fc chain. ADCC-enhanced Heterodimeric Backbone 10 with Xtend includes S239D/I332E on the first heterodimeric Fc chain and S239D on the second heterodimeric Fc chain. ADCC-enhanced Heterodimeric Backbone 11 with Xtend includes S239D/I332E on the first heterodimeric Fc chain and I332E on the second heterodimeric Fc chain. ADCC-enhanced Heterodimeric Backbone 12 with Xtend includes S239D on the first heterodimeric Fc chain and S239D/I332E on the second heterodimeric Fc chain. ADCC-enhanced Heterodimeric Backbone 13 with Xtend includes I332E on the first heterodimeric Fc chain and S239D/I332E on the second heterodimeric Fc chain. ADCC-enhanced Heterodimeric Backbone 14 with Xtend includes S239D on the first heterodimeric Fc chain and I332E on the second heterodimeric Fc chain. ADCC-enhanced Heterodimeric Backbone 15 with Xtend includes I332E on the first heterodimeric Fc chain and S239D on the second heterodimeric Fc chain.

[0198] Included within each of these backbones are sequences that are 90, 95, 98 and 99% identical (as defined herein) to the recited sequences, and/or contain from 1, 2, 3, 4, 5, 6, 7, 8, 9 or 10 additional amino acid substitutions (as compared to the “parent” of the Figure, which, as will be appreciated by those in the art, already contain a number of amino acid modifications as compared to the parental human IgG1. That is, the recited backbones may contain additional amino acid modifications (generally amino acid substitutions) in addition or as an alternative to the skew, pI and ablation variants contained within the backbones of this Figure. Additionally, the backbones depicted herein may include deletion of the C-terminal glycine (K446_) and/or lysine (K447_). The C-terminal glycine and/or lysine deletion may be intentionally engineered to reduce heterogeneity or in the context of certain bispecific formats, such as the mAb-scFv format. Additionally, C-terminal glycine and/or lysine deletion may occur naturally for example during production and storage.

[0199] FIGS. 61A-61B show IFNγ production by NKG2D-targeting NKEs. FIG. 61A depicts the ability of NKG2D-targeting NKEs to induce IFNγ production even in the absence of FcγR engagement. FIG. 61B further illustrates that IFNγ production is driven by the NKG2D targeting arm by comparing it with an RSV×B7H3 Fc WT isotype control.

### DETAILED DESCRIPTION

### I. Overview

[0200] The description is presented to enable one of ordinary skill in the art to make and use the invention and is provided in the context of a patent application and its requirements. The section headings used herein are for organization purposes only and are not to be construed as limiting the subject matter described. While various embodiments of the invention(s) of the present disclosure have been shown and described herein, it will be obvious to those skilled in the art that such embodiments are provided by way of example only. Numerous variations, changes, and substitutions may occur to those skilled in the art without departing from the invention(s). It should be understood that various alternatives to the embodiments of the invention(s) described herein may be employed in practicing any one of the inventions(s) set forth herein.

[0201] All patents, published patent applications, other publications, and sequences from GenBank, and other databases referred to herein are incorporated by reference in their entirety with respect to the related technology.

### II. Nomenclature

[0202] The antibodies provided herein are listed in several different formats. In some instances, each monomer of a particular antibody is given a unique “XENP” number, although as will be appreciated in the art, a longer sequence might contain a shorter one. For example, a “scFv-Fc” monomer of a 1+1 Fab-scFv-Fc format antibody may have a first XENP number, while the scFv domain itself will have a different XENP number. Some molecules have three polypeptides, so the XENP number, with the components, is used as a name. Thus, the molecule XENP37630, which is in 2+1 Fab₂-scFv-Fc format, comprises three sequences (see FIG. 59A) a “Fab-Fc Heavy Chain” monomer (“Chain 1”); 2) a “Fab-scFv-Fc Heavy Chain” monomer (“Chain 2”); and 3) a “Light Chain” monomer (“Chain 3”) or equivalents, although one of skill in the art would be able to identify these easily through sequence alignment. These XENP numbers are in the sequence listing as well as identifiers, and used in the Figures. In addition, one molecule, comprising the three components, gives rise to multiple sequence identifiers. For example, the listing of the Fab includes, the full heavy chain sequence, the variable heavy domain sequence and the three CDRs of the variable heavy domain sequence, the full light chain sequence, a variable light domain sequence and the three CDRs of the variable light domain sequence. A Fab-scFv-Fc monomer includes a full-length sequence, a variable heavy domain sequence, 3 heavy CDR sequences, and an scFv sequence (include scFv variable heavy domain sequence, scFv variable light domain sequence and scFv linker). Note that some molecules herein with a scFv domain use a single charged scFv linker (+H), although others can be used. In addition, the naming nomenclature of particular antigen binding domains (e.g., NKG2D and B7H3 binding domains) use a “Hx.xx_Ly.yy” type of format, with the numbers being unique identifiers to particular variable chain sequences. Thus, an Fv domain of the antigen binding domain is “H1 L1”, which indicates that the variable heavy domain, H1, was combined with the light domain L1. In the case that these sequences are used as scFvs, the designation “H1 L1”, indicates that the variable heavy domain, H1 is combined with the light domain, L1, and is in VH-linker-V_{L} orientation, from N- to C-terminus. This molecule with the identical sequences of the heavy and light variable domains but in the reverse order (V_{L}-linker-V_{H} orientation, from N- to C-terminus) would be designated “L1_H1.1”. Similarly, different constructs may “mix and match” the heavy and light chains as will be evident from the sequence listing and the figures.

### III. Definitions

[0203] In order that the application may be more completely understood, several definitions are set forth below. Such definitions are meant to encompass grammatical equivalents.

[0204] As used herein, the singular forms “a,” “an”, and “the” include plural referents unless the context clearly dictates otherwise. Thus, for example, reference to “an antigen” includes mixtures of antigens; reference to “a pharmaceutically acceptable carrier” includes mixtures of two or more such carriers, and the like. As such, the terms “a” (or “an”), “one or more,” and “at least one” can be used interchangeably herein.

[0205] Furthermore, “and/or” where used herein is to be taken as specific disclosure of each of the two specified features or components with or without the other. Thus, the term “and/or” as used in a phrase such as “A and/or B” herein is intended to include “A and B,” “A or B,” “A (alone)”, and “B (alone)”.

[0206] As used herein, the term “about” a value (or parameter) refers to ±10% of a stated value. When referring to a range of values (or parameters), the term “about” refers to +10% of the upper limit and −10% of the lower limit of a stated range of values. When a range of values is provided, it is to be understood that each intervening value between the upper and lower limit of that range, and any other stated or intervening value in that stated range, is encompassed within the scope of the present disclosure. Where the stated range includes upper and/or lower limits, ranges excluding either of those included limits are also included in the present disclosure.

[0207] By “NKG2D,” “NKG2-D,” “natural killer group 2D,” “CD314,” (e.g., GenBank Accession Numbers NP_031386.2 (human), NP_001186734.1 (human), and NP_001076791.1 (mouse)), herein is meant a transmembrane protein belonging to the NKG2 family of C-type lectin-like receptors. NKG2D is a major recognition receptor for the detection and elimination of transformed and/or infected cells as its ligands are induced during cellular stress, either as a result of infection or genomic stress, such as in cancer. In humans, NKG2D is expressed by NK cells, γδ T cells, and CD8⁺ αβ T cells. Exemplary NKG2D sequences are depicted in FIG. 11. Unless otherwise noted, references to NKG2D are to the human NKG2D sequence.

[0208] By “B7H3,” “B7-H3,” “B7RP-2,” “CD276,” “Cluster of Differentiation 276,” (e.g., GenBank Accession Numbers NP_001019907 (human), NP_001316557 (human), NP_001316558 (human), NP_079516 (human), and NP_598744 (mouse)) herein is meant a type-1 transmembrane protein that is a member of the B7 family possessing an ectodomain composed of a single IgV-IgC domain pair. B7H3 is an immune checkpoint molecule and is aberrantly overexpressed in many types of cancers. Exemplary B7H3 sequences are depicted in FIGS. 12A-12B. Unless otherwise noted, references to B7H3 are to the human B7H3 sequence.

[0209] By “ablation” herein is meant a decrease or removal of activity. Thus, for example, “ablating FcγR binding” means the Fc region amino acid variant has less than 50% starting binding as compared to an Fc region not containing the specific variant, with more than 70-80-90-95-98% loss of activity being preferred, and in general, with the activity being below the level of detectable binding in a Biacore, SPR or BLI assay.

[0210] By “ADCC” or “antibody dependent cell-mediated cytotoxicity” as used herein is meant the cell-mediated reaction, wherein nonspecific cytotoxic cells that express FcγRs recognize bound antibody on a target cell and subsequently cause lysis of the target cell. ADCC is correlated with binding to FcγRIIIa; increased binding to FcγRIIIa leads to an increase in ADCC activity.

[0211] By “ADCP” or antibody dependent cell-mediated phagocytosis as used herein is meant the cell-mediated reaction wherein nonspecific phagocytic cells that express FcγRs recognize bound antibody on a target cell and subsequently cause phagocytosis of the target cell.

[0212] As used herein, the term “antibody” is used generally. Antibodies provided herein can take on a number of formats as described herein, including traditional antibodies as well as antibody derivatives, fragments, and mimetics, described herein.

[0213] Traditional immunoglobulin (Ig) antibodies are “Y” shaped tetramers. Each tetramer is typically composed of two identical pairs of polypeptide chains, each pair having one “light chain” monomer (typically having a molecular weight of about 25 kDa) and one “heavy chain” monomer (typically having a molecular weight of about 50-70 kDa).

[0214] Other useful antibody formats include, but are not limited to, the “1+1 Fab-scFv-Fc,” “2+1 Fab₂-scFv-Fc,” “2+1 mAb-scFv,” and “stackFab2-scFv-Fc” formats provided herein (see, e.g., FIG. 15). Additional useful antibody formats include, but are not limited to, “mAb-Fv,” “mAb-scFv,” “central-Fv”, “one armed scFv-mAb,” “scFv-mAb,” “dual scFv,” and “trident” format antibodies, as disclosed in U.S. Pat. No. 10,793,632, which is incorporated by reference herein, particularly in pertinent part relating to antibody formats (see, e.g., FIG. 2 of U.S. Pat. No. 10,793,632).

[0215] Antibody heavy chains typically include a variable heavy (V_{H}) domain, which includes vhCDR1-3, and an Fc domain, which includes a CH2-CH3 monomer. In some embodiments, antibody heavy chains include a hinge and CH1 domain. Traditional antibody heavy chains are monomers that are organized, from N- to C-terminus: VH-CH1-hinge-CH2-CH3. The CH1-hinge-CH2-CH3 is collectively referred to as the heavy chain “constant domain” or “constant region” of the antibody, of which there are five different categories or “isotypes”: IgA, IgD, IgG, IgE and IgM.

[0216] In some embodiments, the antibodies provided herein include IgG isotype constant domains, which has several subclasses, including, but not limited to IgG1, IgG2, and IgG4. In the IgG subclass of immunoglobulins, there are several immunoglobulin domains in the heavy chain. By “immunoglobulin (Ig) domain” herein is meant a region of an immunoglobulin having a distinct tertiary structure. Of interest in the present invention are the heavy chain domains, including, the constant heavy (CH) domains and the hinge domains. In the context of IgG antibodies, the IgG isotypes each have three CH regions. Accordingly, “CH” domains in the context of IgG are as follows: “CH1” refers to positions 118-215 according to the EU index as in Kabat. “Hinge” refers to positions 216-230 according to the EU index as in Kabat. “CH2” refers to positions 231-340 according to the EU index as in Kabat, and “CH3” refers to positions 341-447 according to the EU index as in Kabat. As shown in Table 1, the exact numbering and placement of the heavy chain domains can be different among different numbering systems. As shown herein and described below, the pI variants can be in one or more of the CH regions, as well as the hinge region, discussed below.

[0217] It should be noted that IgG1 has different allotypes with polymorphisms at 356 (D or E) and 358 (L or M). The sequences depicted herein use the 356E/358M allotype, however the other allotype is included herein. That is, any sequence inclusive of an IgG1 Fc domain included herein can have 356D/358L replacing the 356E/358M allotype. It should be understood that therapeutic antibodies can also comprise hybrids of isotypes and/or subclasses. For example, as shown in US Publication 2009/0163699, incorporated by reference, the present antibodies, in some embodiments, include human IgG1/G2 hybrids.

[0218] By “Fc” or “Fc region” or “Fc domain” as used herein is meant the polypeptide comprising the constant region of an antibody, in some instances, excluding all of the first constant region immunoglobulin domain (e.g., CH1) or a portion thereof, and in some cases, optionally including all or part of the hinge. For IgG, the Fc domain comprises immunoglobulin domains CH2 and CH3 (Cγ2 and Cγ3), and optionally all or a portion of the hinge region between CH1 (Cγ1) and CH2 (Cγ2). Thus, in some cases, the Fc domain includes, from N- to C-terminal, CH2-CH3 and hinge-CH2-CH3. In some embodiments, the Fc domain is that from IgG1, IgG2, or IgG4, with IgG1 hinge-CH2-CH3 and IgG4 hinge-CH2-CH3 finding particular use in many embodiments. Additionally, in the case of human IgG1 Fc domains, the hinge may include a C220S amino acid substitution. Furthermore, in the case of human IgG4 Fc domains, the hinge may include a S228P amino acid substitution. Although the boundaries of the Fc region may vary, the human IgG heavy chain Fc region is usually defined to include residues E216, C226, or A231 to its carboxyl-terminal, wherein the numbering is according to the EU index as in Kabat. In some embodiments, as is more fully described below, amino acid modifications are made to the Fc region, for example to alter binding to one or more FcγR or to the FcRn.

[0219] By “heavy chain constant region” herein is meant the CH1-hinge-CH2-CH3 portion of an antibody (or fragments thereof), excluding the variable heavy domain; in EU numbering of human IgG1 this is amino acids 118-447. By “heavy chain constant region fragment” herein is meant a heavy chain constant region that contains fewer amino acids from either or both of the N- and C-termini but still retains the ability to form a dimer with another heavy chain constant region.

[0220] Another type of domain of the heavy chain is the hinge region. By “hinge” or “hinge region” or “antibody hinge region” or “hinge domain” herein is meant the flexible polypeptide comprising the amino acids between the first and second constant domains of an antibody. Structurally, the IgG CH1 domain ends at EU position 215, and the IgG CH2 domain begins at residue EU position 231. Thus, for IgG the antibody hinge is herein defined to include positions 216 (E216 in IgG1) to 230 (P230 in IgG1), wherein the numbering is according to the EU index as in Kabat. In some cases, a “hinge fragment” is used, which contains fewer amino acids at either or both of the N- and C-termini of the hinge domain. As noted herein, pI variants can be made in the hinge region as well. Many of the antibodies herein have at least one the cysteines at position 220 according to EU numbering (hinge region) replaced by a serine. Generally, this modification is on the “scFv monomer” side (when 1+1 or 2+1 formats are used) for most of the sequences depicted herein, although it can also be on the “Fab monomer” side, or both, to reduce disulfide formation. Specifically included within the sequences herein are one or both of these cysteines replaced (C220S).

[0221] As will be appreciated by those in the art, the exact numbering and placement of the heavy chain constant region domains (i.e., CH1, hinge, CH2 and CH3 domains) can be different among different numbering systems. A useful comparison of heavy constant region numbering according to EU and Kabat is as below, see Edelman et al., 1969, Proc Natl Acad Sci USA 63:78-85 and Kabat et al., 1991, Sequences of Proteins of Immunological Interest, 5th Ed., United States Public Health Service, National Institutes of Health, Bethesda, entirely incorporated by reference.

TABLE 1

| | EU Numbering | Kabat Numbering |
|---|---|---|
| CH1 | 118-215 | 114-223 |
| Hinge | 216-230 | 226-243 |
| CH2 | 231-340 | 244-360 |
| CH3 | 341-447 | 361-478 |

[0222] The antibody light chain generally comprises two domains: the variable light domain (V_{L}), which includes light chain CDRs vlCDR1-3, and a constant light chain region (often referred to as C_{L} or C_{K}). The antibody light chain is typically organized from N- to C-terminus: V_{L}-C_{L}.

[0223] By “antigen binding domain” or “ABD” herein is meant a set of six Complementary Determining Regions (CDRs) that, when present as part of a polypeptide sequence, specifically binds a target antigen (e.g., B7H3 or NKG2D) as discussed herein. As is known in the art, these CDRs are generally present as a first set of variable heavy CDRs (vhCDRs or VHCDRs) and a second set of variable light CDRs (vlCDRs or VLCDRs), each comprising three CDRs: vhCDR1, vhCDR2, vhCDR3 variable heavy CDRs and vlCDR1, vlCDR2 and vlCDR3 vhCDR3 variable light CDRs. The CDRs are present in the variable heavy domain (vhCDR1-3) and variable light domain (vlCDR1-3). The variable heavy domain and variable light domain from an Fv region.

[0224] The present invention provides a large number of different CDR sets. In this case, a “full CDR set” comprises the three variable light and three variable heavy CDRs, e.g., a vlCDR1, vlCDR2, vlCDR3, vhCDR1, vhCDR2 and vhCDR3. These can be part of a larger variable light or variable heavy domain, respectfully. In addition, as more fully outlined herein, the variable heavy and variable light domains can be on separate polypeptide chains, when a heavy and light chain is used (for example when Fabs are used), or on a single polypeptide chain in the case of scFv sequences.

[0225] As will be appreciated by those in the art, the exact numbering and placement of the CDRs can be different among different numbering systems. However, it should be understood that the disclosure of a variable heavy and/or variable light sequence includes the disclosure of the associated (inherent) CDRs. Accordingly, the disclosure of each variable heavy region is a disclosure of the vhCDRs (e.g., vhCDR1, vhCDR2 and vhCDR3) and the disclosure of each variable light region is a disclosure of the vlCDRs (e.g., vlCDR1, vlCDR2 and vlCDR3). A useful comparison of CDR numbering is as below, see Lafranc et al., Dev. Comp. Immunol. 27(1): 55-77 (2003).

TABLE 2

| | Kabat + | | | | | | |
|---|---|---|---|---|---|---|---|
| | Chothia | IMGT | Kabat | AbM | Chothia | Contact | Xencor |
| vhCDR1 | 26-35 | 27-38 | 31-35 | 26-35 | 23-32 | 30-35 | 27-35 |
| vhCDR2 | 50-65 | 56-65 | 50-65 | 50-58 | 52-56 | 47-58 | 54-61 |
| vhCDR3 | 95-102 | 105-117 | 95-102 | 95-102 | 95-102 | 93-101 | 103-116 |
| vlCDR1 | 24-34 | 27-38 | 24-34 | 24-34 | 24-34 | 30-36 | 27-38 |
| vlCDR2 | 50-56 | 56-65 | 50-56 | 50-56 | 50-56 | 46-55 | 56-62 |
| vlCDR3 | 89-97 | 105-117 | 89-97 | 89-97 | 89-97 | 89-96 | 97-105 |

[0226] Throughout the present specification, the Kabat numbering system is generally used when referring to a residue in the variable domain (approximately, residues 1-107 of the light chain variable region and residues 1-113 of the heavy chain variable region) and the EU numbering system for Fc regions (e.g., Kabat et al., supra (1991)).

[0227] The CDRs contribute to the formation of the antigen-binding, or more specifically, epitope binding site of the antigen binding domains and antibodies. “Epitope” refers to a determinant that interacts with a specific antigen binding site in the variable region of an antibody molecule known as a paratope. Epitopes are groupings of molecules such as amino acids or sugar side chains and usually have specific structural characteristics, as well as specific charge characteristics. A single antigen may have more than one epitope.

[0228] The epitope may comprise amino acid residues directly involved in the binding (also called immunodominant component of the epitope) and other amino acid residues, which are not directly involved in the binding, such as amino acid residues which are effectively blocked by the specifically antigen binding peptide; in other words, the amino acid residue is within the footprint of the specifically antigen binding peptide.

[0229] Epitopes may be either conformational or linear. A conformational epitope is produced by spatially juxtaposed amino acids from different segments of the linear polypeptide chain. A linear epitope is one produced by adjacent amino acid residues in a polypeptide chain. Conformational and non-conformational epitopes may be distinguished in that the binding to the former but not the latter is lost in the presence of denaturing solvents.

[0230] An epitope typically includes at least 3, and more usually, at least 5 or 8-10 amino acids in a unique spatial conformation. Antibodies that recognize the same epitope can be verified in a simple immunoassay showing the ability of one antibody to block the binding of another antibody to a target antigen, for example “binning.” As outlined below, the invention not only includes the enumerated antigen binding domains and antibodies herein, but those that compete for binding with the epitopes bound by the enumerated antigen binding domains.

[0231] In some embodiments, the six CDRs of the antigen binding domain are contributed by a variable heavy and a variable light domain. In a “Fab” format, the set of 6 CDRs are contributed by two different polypeptide sequences, the variable heavy domain (vh or VH or V_{H}; containing the vhCDR1, vhCDR2 and vhCDR3) and the variable light domain (vl or VL or V_{L}; containing the vlCDR1, vlCDR2 and vlCDR3), with the C-terminus of the vh domain being attached to the N-terminus of the CH1 domain of the heavy chain and the C-terminus of the vl domain being attached to the N-terminus of the constant light domain (and thus forming the light chain). In a scFv format, the vh and vl domains are covalently attached, generally through the use of a linker (a “scFv linker”) as outlined herein, into a single polypeptide sequence, which can be either (starting from the N-terminus) vh-linker-vl or vl-linker-vh, with the former being generally preferred (including optional domain linkers on each side, depending on the format used. In general, the C-terminus of the scFv domain is attached to the N-terminus of all or part of the hinge in the second monomer.

[0232] By “variable region” or “variable domain” as used herein is meant the region of an immunoglobulin that comprises one or more Ig domains substantially encoded by any of the V_{κ}, V_{λ}, and/or V_{H} genes that make up the kappa, lambda, and heavy chain immunoglobulin genetic loci respectively, and contains the CDRs that confer antigen specificity. Thus, a “variable heavy domain” pairs with a “variable light domain” to form an antigen binding domain (“ABD”). In addition, each variable domain comprises three hypervariable regions (“complementary determining regions,” “CDRs”) (vhCDR1, vhCDR2 and vhCDR3 for the variable heavy domain and vlCDR1, vlCDR2 and vlCDR3 for the variable light domain) and four framework (FR) regions, arranged from amino-terminus to carboxy-terminus in the following order: FR1-CDR1-FR2-CDR2-FR3-CDR3-FR4.

[0233] By “Fab” or “Fab region” as used herein is meant the antibody region that comprises the V_{H}, CH1, V_{L}, and C_{L} immunoglobulin domains, generally on two different polypeptide chains (e.g., V_{H}-CH1 on one chain and V_{L}-C_{L} on the other). Fab may refer to this region in isolation, or this region in the context of a bispecific antibody of the invention. In the context of a Fab, the Fab comprises an Fv region in addition to the CH1 and C_{L} domains.

[0234] By “Fv” or “Fv fragment” or “Fv region” as used herein is meant the antibody region that comprises the V_{L} and V_{H} domains. Fv regions can be formatted as both Fabs (as discussed above, generally two different polypeptides that also include the constant regions as outlined above) and single chain Fvs (scFvs), where the vl and vh domains are included in a single peptide, attached generally with a linker as discussed herein.

[0235] By “single chain Fv” or “scFv” herein is meant a variable heavy domain covalently attached to a variable light domain, generally using a scFv linker as discussed herein, to form a scFv or scFv domain. A scFv domain can be in either orientation from N- to C-terminus (vh-linker-vl or vl-linker-vh). In the sequences depicted in the sequence listing and in the figures, the order of the vh and vl domain is indicated in the name, e.g., H.X L.Y means N- to C-terminal is vh-linker-vl, and L.Y H.X is vl-linker-vh.

[0236] Some embodiments of the subject antibodies provided herein comprise at least one scFv domain, which, while not naturally occurring, generally includes a variable heavy domain and a variable light domain, linked together by a scFv linker. As outlined herein, while the scFv domain is generally from N- to C-terminus oriented as V_{H}-scFv linker-V_{L}, this can be reversed for any of the scFv domains (or those constructed using vh and vl sequences from Fabs), to V_{L}-scFv linker-V_{H}, with optional linkers at one or both ends depending on the format.

[0237] By “modification” or “variant” herein is meant an amino acid substitution, insertion, and/or deletion in a polypeptide sequence or an alteration to a moiety chemically linked to a protein. For example, a modification may be an altered carbohydrate or PEG structure attached to a protein. By “amino acid modification” herein is meant an amino acid substitution, insertion, and/or deletion in a polypeptide sequence. For clarity, unless otherwise noted, the amino acid modification is always to an amino acid coded for by DNA, e.g., the 20 amino acids that have codons in DNA and RNA.

[0238] By “amino acid substitution” or “substitution” herein is meant the replacement of an amino acid at a particular position in a parent polypeptide sequence with a different amino acid. In particular, in some embodiments, the substitution is to an amino acid that is not naturally occurring at the particular position, either not naturally occurring within the organism or in any organism. For example, the substitution E272Y refers to a variant polypeptide, in this case an Fc variant, in which the glutamic acid at position 272 is replaced with tyrosine. For clarity, a protein which has been engineered to change the nucleic acid coding sequence but not change the starting amino acid (for example exchanging CGG (encoding arginine) to CGA (still encoding arginine) to increase host organism expression levels) is not an “amino acid substitution;” that is, despite the creation of a new gene encoding the same protein, if the protein has the same amino acid at the particular position that it started with, it is not an amino acid substitution.

[0239] By “amino acid insertion” or “insertion” as used herein is meant the addition of an amino acid sequence at a particular position in a parent polypeptide sequence. For example, -233E or 233E designates an insertion of glutamic acid after position 233 and before position 234. Additionally, -233ADE or A233ADE designates an insertion of AlaAspGlu after position 233 and before position 234.

[0240] By “amino acid deletion” or “deletion” as used herein is meant the removal of an amino acid sequence at a particular position in a parent polypeptide sequence. For example, E233- or E233 #, E233( ), E233_, or E233del designates a deletion of glutamic acid at position 233. Additionally, EDA233- or EDA233 # designates a deletion of the sequence GluAspAla that begins at position 233.

[0241] By “variant protein” or “protein variant”, or “variant” as used herein is meant a protein that differs from that of a parent protein by virtue of at least one amino acid modification. The protein variant has at least one amino acid modification compared to the parent protein, yet not so many that the variant protein will not align with the parental protein using an alignment program such as that described below. In general, variant proteins (such as variant Fc domains, etc., outlined herein, are generally at least 75, 80, 85, 90, 91, 92, 93, 94, 95, 96, 97, 98 or 99% identical to the parent protein, using the alignment programs described below, such as BLAST.

[0242] “Variant” as used herein also refers to particular amino acid modifications that confer particular function (e.g., a “heterodimerization variant,” “pI variant,” “ablation variant,” etc.).

[0243] As described below, in some embodiments the parent polypeptide, for example an Fc parent polypeptide, is a human wild-type sequence, such as the heavy constant domain or Fc region from IgG1, IgG2, or IgG4, although human sequences with variants can also serve as “parent polypeptides”, for example the IgG1/2 hybrid of US Publication 2006/0134105 can be included. The protein variant sequence herein will preferably possess at least about 80% identity with a parent protein sequence, and most preferably at least about 90% identity, more preferably at least about 95-98-99% identity. Accordingly, by “antibody variant” or “variant antibody” as used herein is meant an antibody that differs from a parent antibody by virtue of at least one amino acid modification, “IgG variant” or “variant IgG” as used herein is meant an antibody that differs from a parent IgG (again, in many cases, from a human IgG sequence) by virtue of at least one amino acid modification, and “immunoglobulin variant” or “variant immunoglobulin” as used herein is meant an immunoglobulin sequence that differs from that of a parent immunoglobulin sequence by virtue of at least one amino acid modification. “Fc variant” or “variant Fc” as used herein is meant a protein comprising an amino acid modification in an Fc domain as compared to an Fc domain of human IgG1, IgG2, or IgG4.

[0244] “Fc variant” or “variant Fc” as used herein is meant a protein comprising an amino acid modification in an Fc domain. The modification can be an addition, deletion, or substitution. The Fc variants are defined according to the amino acid modifications that compose them. Thus, for example, N434S or 434S is an Fc variant with the substitution for serine at position 434 relative to the parent Fc polypeptide, wherein the numbering is according to the EU index. Likewise, M428L/N434S defines an Fc variant with the substitutions M428L and N434S relative to the parent Fc polypeptide. The identity of the WT amino acid may be unspecified, in which case the aforementioned variant is referred to as 428L/434S. It is noted that the order in which substitutions are provided is arbitrary, that is to say that, for example, 428L/434S is the same Fc variant as 434S/428L, and so on. For all positions discussed herein that relate to antibodies or derivatives and fragments thereof (e.g., Fc domains), unless otherwise noted, amino acid position numbering is according to the EU index. The “EU index” or “EU index as in Kabat” or “EU numbering” scheme refers to the numbering of the EU antibody (Edelman et al., 1969, Proc Natl Acad Sci USA 63:78-85, hereby entirely incorporated by reference). The modification can be an addition, deletion, or substitution.

[0245] In general, variant Fc domains have at least about 80, 85, 90, 95, 97, 98 or 99 percent identity to the corresponding parental human IgG Fc domain (using the identity algorithms discussed below, with one embodiment utilizing the BLAST algorithm as is known in the art, using default parameters). Alternatively, the variant Fc domains can have from 1, 2, 3, 4, 5, 6, 7, 8, 9, 10, 11, 12, 13, 14, 15, 16, 11, 12, 13, 14, 15, 16, 17, 18, 19 or 20 amino acid modifications as compared to the parental Fc domain. Alternatively, the variant Fc domains can have up to 1, 2, 3, 4, 5, 6, 7, 8, 9, 10, 11, 12, 13, 14, 15, 16, 11, 12, 13, 14, 15, 16, 17, 18, 19 or 20 amino acid modifications as compared to the parental Fc domain. Additionally, as discussed herein, the variant Fc domains described herein still retain the ability to form a dimer with another Fc domain as measured using known techniques as described herein, such as non-denaturing gel electrophoresis.

[0246] By “protein” as used herein is meant at least two covalently attached amino acids, which includes proteins, polypeptides, oligopeptides, and peptides. In addition, polypeptides that make up the antibodies of the invention may include synthetic derivatization of one or more side chains or termini, glycosylation, PEGylation, circular permutation, cyclization, linkers to other molecules, fusion to proteins or protein domains, and addition of peptide tags or labels.

[0247] By “residue” as used herein is meant a position in a protein and its associated amino acid identity. For example, Asparagine 297 (also referred to as Asn297 or N297) is a residue at position 297 in the human antibody IgG1.

[0248] By “IgG subclass modification” or “isotype modification” as used herein is meant an amino acid modification that converts one amino acid of one IgG isotype to the corresponding amino acid in a different, aligned IgG isotype. For example, because IgG1 comprises a tyrosine and IgG2 a phenylalanine at EU position 296, a F296Y substitution in IgG2 is considered an IgG subclass modification.

[0249] By “non-naturally occurring modification” as used herein is meant an amino acid modification that is not isotypic. For example, because none of the human IgGs comprise a serine at position 434, the substitution 434S in IgG1, IgG2, or IgG4 (or hybrids thereof) is considered a non-naturally occurring modification.

[0250] By “amino acid” and “amino acid identity” as used herein is meant one of the 20 naturally occurring amino acids that are coded for by DNA and RNA.

[0251] By “effector function” as used herein is meant a biochemical event that results from the interaction of an antibody Fc region with an Fc receptor or ligand. Effector functions include but are not limited to ADCC, ADCP, and CDC.

[0252] By “IgG Fc ligand” as used herein is meant a molecule, preferably a polypeptide, from any organism that binds to the Fc region of an IgG antibody to form an Fc/Fc ligand complex. Fc ligands include but are not limited to FcγRIs, FcγRIIs, FcγRIIIs, FcRn, C1q, C3, mannan binding lectin, mannose receptor, staphylococcal protein A, streptococcal protein G, and viral FcyR. Fc ligands also include Fc receptor homologs (FcRH), which are a family of Fc receptors that are homologous to the FcyRs (Davis et al., 2002, Immunological Reviews 190: 123-136, entirely incorporated by reference). Fc ligands may include undiscovered molecules that bind Fc. Particular IgG Fc ligands are FcRn and Fc gamma receptors. By “Fc ligand” as used herein is meant a molecule, preferably a polypeptide, from any organism that binds to the Fc region of an antibody to form an Fc/Fc ligand complex.

[0253] By “Fc gamma receptor,” “FcyR,” “FcγR,” or “FcgammaR” as used herein is meant any member of the family of proteins that bind the IgG antibody Fc region and is encoded by an FcyR gene. In humans this family includes but is not limited to FcγRI (CD64), including isoforms FcγRIa, FcγRIb, and FcγRIc; FcγRII (CD32), including isoforms FcγRIIa (including allotypes H131 and R131), FcγRIIb (including FcyRIIb-1 and FcyRIIb-2), and FcγRIIc; and FcγRIII (CD16), including isoforms FcyRIIIa (including allotypes V158 and F158) and FcγRIIIb (including allotypes FcyRIIb-NA1 and FcyRIIb-NA2) (Jefferis et al., 2002, Immunol Lett 82:57-65, entirely incorporated by reference), as well as any undiscovered human FcyRs or FcyR isoforms or allotypes. An FcyR may be from any organism, including but not limited to humans, mice, rats, rabbits, and monkeys. Mouse FcyRs include but are not limited to FcγRI (CD64), FcγRII (CD32), FcγRIII (CD16), and FcγRIII-2 (CD16-2), as well as any undiscovered mouse FcyRs or FcyR isoforms or allotypes.

[0254] By “FcRn” or “neonatal Fc Receptor” as used herein is meant a protein that binds the IgG antibody Fc region and is encoded at least in part by an FcRn gene. The FcRn may be from any organism, including but not limited to humans, mice, rats, rabbits, and monkeys. As is known in the art, the functional FcRn protein comprises two polypeptides, often referred to as the heavy chain and light chain. The light chain is beta-2-microglobulin and the heavy chain is encoded by the FcRn gene. Unless otherwise noted herein, FcRn or an FcRn protein refers to the complex of FcRn heavy chain with beta-2-microglobulin. A variety of FcRn variants used to increase binding to the FcRn receptor, and in some cases, to increase serum half-life. An “FcRn variant” is an amino acid modification that contributes to increased binding to the FcRn receptor, and suitable FcRn variants are shown below.

[0255] By “parent polypeptide” as used herein is meant a starting polypeptide that is subsequently modified to generate a variant. The parent polypeptide may be a naturally occurring polypeptide, or a variant or engineered version of a naturally occurring polypeptide. Accordingly, by “parent immunoglobulin” as used herein is meant an unmodified immunoglobulin polypeptide that is modified to generate a variant, and by “parent antibody” as used herein is meant an unmodified antibody that is modified to generate a variant antibody. It should be noted that “parent antibody” includes known commercial, recombinantly produced antibodies as outlined below. In this context, a “parent Fc domain” will be relative to the recited variant; thus, a “variant human IgG1 Fc domain” is compared to the parent Fc domain of human IgG1, a “variant human IgG4 Fc domain” is compared to the parent Fc domain human IgG4, etc.

[0256] By “position” as used herein is meant a location in the sequence of a protein. Positions may be numbered sequentially, or according to an established format, for example the EU index for numbering of antibody domains (e.g., a CH1, CH2, CH3 or hinge domain).

[0257] By “target antigen” as used herein is meant the molecule that is bound specifically by the antigen binding domain comprising the variable regions of a given antibody.

[0258] By “strandedness” in the context of the monomers of the heterodimeric antibodies of the invention herein is meant that, similar to the two strands of DNA that “match”, heterodimerization variants are incorporated into each monomer so as to preserve the ability to “match” to form heterodimers. For example, if some pI variants are engineered into monomer A (e.g., making the pI higher) then steric variants that are “charge pairs” that can be utilized as well do not interfere with the pI variants, e.g., the charge variants that make a pl higher are put on the same “strand” or “monomer” to preserve both functionalities. Similarly, for “skew” variants that come in pairs of a set as more fully outlined below, the skilled artisan will consider pI in deciding into which strand or monomer one set of the pair will go, such that pI separation is maximized using the pI of the skews as well.

[0259] By “target cell” as used herein is meant a cell that expresses a target antigen.

[0260] By “host cell” in the context of producing a bispecific antibody according to the invention herein is meant a cell that contains the exogeneous nucleic acids encoding the components of the bispecific antibody and is capable of expressing the bispecific antibody under suitable conditions. Suitable host cells are discussed below.

[0261] By “wild-type” or “WT” herein is meant an amino acid sequence or a nucleotide sequence that is found in nature, including allelic variations. A WT protein has an amino acid sequence or a nucleotide sequence that has not been intentionally modified.

[0262] Provided herein are a number of antibody domains (e.g., Fc domains) that have sequence identity to human antibody domains. Sequence identity between two similar sequences (e.g., antibody variable domains) can be measured by algorithms such as that of Smith, T. F. & Waterman, M. S. (1981) “Comparison Of Biosequences,” Adv. Appl. Math. 2:482 [local homology algorithm]; Needleman, S. B. & Wunsch, C D. (1970) “A General Method Applicable To The Search For Similarities In The Amino Acid Sequence Of Two Proteins,” J. Mol. Biol. 48:443 [homology alignment algorithm], Pearson, W. R. & Lipman, D. J. (1988) “Improved Tools For Biological Sequence Comparison,” Proc. Natl. Acad. Sci. (U.S.A.) 85:2444 [search for similarity method]; or Altschul, S. F. et al, (1990) “Basic Local Alignment Search Tool,” J. Mol. Biol. 215:403-10, the “BLAST” algorithm, see https://blast.ncbi.nlm.nih.gov/Blast.cgi. When using any of the aforementioned algorithms, the default parameters (for Window length, gap penalty, etc.) are used. In one embodiment, sequence identity is done using the BLAST algorithm, using default parameters.

[0263] The antibodies of the present invention are generally isolated or recombinant. “Isolated,” when used to describe the various polypeptides disclosed herein, means a polypeptide that has been identified and separated and/or recovered from a cell or cell culture from which it was expressed. Ordinarily, an isolated polypeptide will be prepared by at least one purification step. An “isolated antibody,” refers to an antibody which is substantially free of other antibodies having different antigenic specificities. “Recombinant” means the antibodies are generated using recombinant nucleic acid techniques in exogeneous host cells, and they can be isolated as well.

[0264] “Specific binding” or “specifically binds to” or is “specific for” a particular antigen or an epitope means binding that is measurably different from a non-specific interaction. Specific binding can be measured, for example, by determining binding of a molecule compared to binding of a control molecule, which generally is a molecule of similar structure that does not have binding activity. For example, specific binding can be determined by competition with a control molecule that is similar to the target.

[0265] Specific binding for a particular antigen or an epitope can be exhibited, for example, by an antibody having a K_{D} for an antigen or epitope of at least about 10⁻⁴ M, at least about 10⁻⁵ M, at least about 10⁻⁶ M, at least about 10⁻⁷ M, at least about 10⁻⁸ M, at least about 10⁻⁹ M, alternatively at least about 10⁻¹⁰ M, at least about 10⁻¹¹ M, at least about 10⁻¹²M, or greater, where K_{D} refers to a dissociation rate of a particular antibody-antigen interaction. Typically, an antibody that specifically binds an antigen will have a K_{D} that is 20-, 50-, 100-, 500-, 1000-, 5,000-, 10,000- or more times greater for a control molecule relative to the antigen or epitope.

[0266] Also, specific binding for a particular antigen or an epitope can be exhibited, for example, by an antibody having a K_{A} or Kₐ for an antigen or epitope of at least 20-, 50-, 100-, 500-, 1000-, 5,000-, 10,000- or more times greater for the epitope relative to a control, where KA or Kₐ refers to an association rate of a particular antibody-antigen interaction. Binding affinity is generally measured using a Biacore, SPR or BLI assay.

### IV. Heterodimeric Antibodies

[0267] In another aspect, provided herein are anti-NKG2D×anti-B7H3 (also referred to herein as “αNKG2D×αB7H3,” “anti-B7H3×anti-NKG2D,” and “αB7H3×αNKG2D”) bispecific antibodies. Such antibodies include at least one NKG2D binding domain and at least one B7H3 binding domain. In some embodiments, bispecific αNKG2D×αB7H3 provided herein NK cell responses selectively in tumor sites that express B7H3.

[0268] Note that unless specified herein, the order of the antigen list in the name does not confer structure; that is an NKG2D×B7H3 1+1 Fab-scFv-Fc antibody can have the scFv bind to NKG2D or B7H3, although in some cases, the order specifies structure as indicated.

[0269] As is more fully outlined herein, these combinations of ABDs can be in a variety of formats, as outlined below, generally in combinations where one ABD is in a Fab format and the other is in an scFv format. Exemplary formats that are used in the bispecific antibodies provided herein include the 1+1 Fab-scFv-Fc and 2+1 Fab₂-scFv-Fc formats (see, e.g., FIGS. 15A and 15B). Other useful antibody formats include, but are not limited to, “mAb-scFv,” and “stackFab2-scFv-Fc” format antibodies, as depicted in FIG. 36 and more fully described below.

[0270] In addition, in general, one of the ABDs comprises a scFv as outlined herein, in an orientation from N- to C-terminus of V_{H}-scFv linker-V_{L} or V_{L}-scFv linker-V_{H}. One or both of the other ABDs, according to the format, generally is a Fab, comprising a V_{H} domain on one protein chain (generally as a component of a heavy chain) and a V_{L} on another protein chain (generally as a component of a light chain).

[0271] As will be appreciated by those in the art, any set of 6 CDRs or V_{H} and V_{L} domains can be in the scFv format or in the Fab format, which is then added to the heavy and light constant domains, where the heavy constant domains comprise variants (including within the CH1 domain as well as the Fc domain). The scFv sequences contained in the sequence listing utilize a particular charged linker, but as outlined herein, uncharged or other charged linkers can be used, including those depicted in FIG. 5.

[0272] In addition, as discussed above, the numbering used in the Sequence Listing for the identification of the CDRs is Kabat, however, different numbering can be used, which will change the amino acid sequences of the CDRs as shown in Table 2.

[0273] For all of the variable heavy and light domains listed herein, further variants can be made. As outlined herein, in some embodiments the set of 6 CDRs can have from 0, 1, 2, 3, 4 or 5 amino acid modifications (with amino acid substitutions finding particular use), as well as changes in the framework regions of the variable heavy and light domains, as long as the frameworks (excluding the CDRs) retain at least about 81, 82, 83, 84, 85, 86, 87, 88, 89, 90, 91, 92, 93, 94, 95, 96, 97, 98, or 99% identity to a human germline sequence selected from those listed in FIG. 1 of U.S. Pat. No. 7,657,380, which Figure and Legend is incorporated by reference in its entirety herein. Thus, for example, the identical CDRs as described herein can be combined with different framework sequences from human germline sequences, as long as the framework regions retain at 81, 82, 83, 84, 85, 86, 87, 88, 89, 90, 91, 92, 93, 94, 95, 96, 97, 98, or 99% identity to a human germline sequence selected from those listed in FIG. 1 of U.S. Pat. No. 7,657,380. Alternatively, the CDRs can have amino acid modifications (e.g., from 1, 2, 3, 4 or 5 amino acid modifications in the set of CDRs (that is, the CDRs can be modified as long as the total number of changes in the set of 6 CDRs is less than 6 amino acid modifications, with any combination of CDRs being changed; e.g., there may be one change in vlCDR1, two in vhCDR2, none in vhCDR3, etc.)), as well as having framework region changes, as long as the framework regions retain at least 80, 81, 82, 83, 84, 85, 86, 87, 88, 89, 90, 91, 92, 93, 94, 95, 96, 97, 98, or 99% identity to a human germline sequence selected from those listed in FIG. 1 of U.S. Pat. No. 7,657,380.

[0274] As discussed herein, the subject heterodimeric antibodies include two antigen binding domains (ABDs), each of which bind to NKG2D or B7H3. As outlined herein, these heterodimeric antibodies can be bispecific and bivalent (each antigen is bound by a single ABD, for example, in the format depicted in FIG. 15A), or bispecific and trivalent (one antigen is bound by a single ABD and the other is bound by two ABDs, for example as depicted in FIG. 15B).

[0275] The antibodies provided herein include different antibody domains as is more fully described below. As described herein and known in the art, the antibodies described herein include different domains within the heavy and light chains, which can be overlapping as well. These domains include, but are not limited to, the Fc domain, the CH1 domain, the CH2 domain, the CH3 domain, the hinge domain, the heavy constant domain (CH1-hinge-Fc domain or CH1-hinge-CH2-CH3), the variable heavy domain, the variable light domain, the light constant domain, Fab domains and scFv domains.

[0276] In particular, the formats depicted in FIG. 15 are usually referred to as “heterodimeric antibodies”, meaning that the protein has at least two associated Fc sequences self-assembled into a heterodimeric Fc domain and at least two Fv regions, whether as Fabs or as scFvs.

[0277] In certain embodiments, the antibodies described herein comprise a heavy chain variable region from a particular germline heavy chain immunoglobulin gene and/or a light chain variable region from a particular germline light chain immunoglobulin gene. For example, such antibodies may comprise or consist of a human antibody comprising heavy or light chain variable regions that are “the product of” or “derived from” a particular germline sequence. A human antibody that is “the product of” or “derived from” a human germline immunoglobulin sequence can be identified as such by comparing the amino acid sequence of the human antibody to the amino acid sequences of human germline immunoglobulins and selecting the human germline immunoglobulin sequence that is closest in sequence (i.e., greatest % identity) to the sequence of the human antibody (using the methods outlined herein). A human antibody that is “the product of” or “derived from” a particular human germline immunoglobulin sequence may contain amino acid differences as compared to the germline sequence, due to, for example, naturally occurring somatic mutations or intentional introduction of site-directed mutation. However, a humanized antibody typically is at least 90% identical in amino acids sequence to an amino acid sequence encoded by a human germline immunoglobulin gene and contains amino acid residues that identify the antibody as being derived from human sequences when compared to the germline immunoglobulin amino acid sequences of other species (e.g., murine germline sequences). In certain cases, a humanized antibody may be at least 95, 96, 97, 98 or 99%, or even at least 96%, 97%, 98%, or 99% identical in amino acid sequence to the amino acid sequence encoded by the germline immunoglobulin gene. Typically, a humanized antibody derived from a particular human germline sequence will display no more than 10-20 amino acid differences from the amino acid sequence encoded by the human germline immunoglobulin gene (prior to the introduction of any skew, pI, and ablation variants herein; that is, the number of variants is generally low, prior to the introduction of the variants described herein). In certain cases, the humanized antibody may display no more than 5, or even no more than 4, 3, 2, or 1 amino acid difference from the amino acid sequence encoded by the germline immunoglobulin gene (again, prior to the introduction of any skew, pI, and ablation variants herein; that is, the number of variants is generally low, prior to the introduction of the variants described herein). In some embodiments, the amino acid differences are in one or more of the 6 CDRs. In some embodiments, the amino acid differences are in a V_{H} and/or V_{L} framework region.

[0278] In one embodiment, the parent antibody has been affinity matured, as is known in the art. Structure-based methods may be employed for humanization and affinity maturation, for example as described in U.S. Ser. No. 11/004,590. Selection based methods may be employed to humanize and/or affinity mature antibody variable regions, including but not limited to methods described in Wu et al., 1999, J. Mol. Biol. 294:151-162; Baca et al., 1997, J. Biol. Chem. 272(16):10678-10684; Rosok et al., 1996, J. Biol. Chem. 271(37): 22611-22618; Rader et al., 1998, Proc. Natl. Acad. Sci. USA 95: 8910-8915; Krauss et al., 2003, Protein Engineering 16(10):753-759, all entirely incorporated by reference. Other humanization methods may involve the grafting of only parts of the CDRs, including but not limited to methods described in U.S. Ser. No. 09/810,510; Tan et al., 2002, J. Immunol. 169:1119-1125; De Pascalis et al., 2002, J. Immunol. 169:3076-3084, all entirely incorporated by reference.

### (i) Bispecific, Heterodimeric Antibodies as Natural Killer Cell Engagers

[0279] In one aspect, provided herein are anti-B7H3×anti-NKG2D bispecific antibodies, which are exemplary embodiments of a Natural Killer cell Engager (NKE). Generally, NKEs are multifunctional molecules that target activating or inhibitory receptors (in particular the ECD of such receptors) expressed on the surface of NK cells, bind to tumor associated antigens (in particular the ECD of such antigens) and activate Fc gamma receptors expressed on effector cells of a subject's immune system. The different domains of an NKE including the NK cell antigen binding domain, the tumor associated antigen binding domain and the Fc domains can modulate its activity and function.

[0280] As described herein and known in the art, the antibodies include different domains within the heavy and light chains, which can be overlapping as well. These domains include, but are not limited to, the Fc domain, the CH1 domain, the CH2 domain, the CH3 domain, the hinge domain, the heavy constant domain (CH1-hinge-Fc domain or CH1-hinge-CH2-CH3), the variable heavy domain, the variable light domain, the light constant domain, Fab domains and scFv domains. It should be noted that the term “Fc domain” includes both the CH2-CH3 (and optionally the hinge, hinge-CH2-CH3) of a single monomer, as well as the dimer of two Fc domains that self-assemble. That is, the heavy chain of an antibody has an Fc domain that is a single polypeptide, while the assembled bispecific antibody has an Fc domain that contains two polypeptides. Various antibody domains included in the bispecific, heterodimeric antibodies are more fully described below.

[0281] In particular, the formats schematically depicted in FIGS. 15A-15D are usually referred to as “heterodimeric antibodies,” meaning that the antibody format has at least two associated Fc sequences self-assembled into a heterodimeric Fc domain and at least two Fv regions, whether as Fabs or as scFvs.

[0282] Described below are useful variant Fc domains that include amino acid modifications (i.e., substitutions, insertions, or deletions) to enhance FcγR-mediated cytotoxicity, increase serum half-life, and facilitate the self-assembly and/or purification of the heterodimeric antibodies provided. Also, exemplary anti-B7H3×anti-NKG2D bispecific antibodies that include such variant Fc domains are described below and set forth in the Figures including FIGS. 56, 57, and 59, and the corresponding sequences in the Sequence Listing.

[0283] A. Fc Domain Variants for Increasing Antibody-Dependent Cellular Cytotoxicity (ADCC)

[0284] There are a number of useful Fc substitutions that can be made to alter binding to one or more of the FcγR receptors. Substitutions that result in increased binding (or in some cases, decreased binding) can be useful. For example, it is known that increased binding to FcγRIIIa can result in increased ADCC (antibody dependent cell-mediated cytotoxicity). In some instances, decreased binding to FcγRIIb (an inhibitory receptor) can be beneficial as well. Amino acid substitutions that find use in the present invention include those listed in U.S. Ser. No. 11/124,620 (particularly FIG. 41), U.S. Ser. Nos. 11/174,287, 11/396,495, 11/538,406, all of which are expressly incorporated herein by reference in their entirety and specifically for the variants disclosed therein.

[0285] In some embodiments, provided herein are bispecific antibodies containing Fc variants that increase antibody-dependent cellular cytotoxicity (ADCC; the cell-mediated reaction wherein nonspecific cytotoxic cells that express FcγRs recognize bound antibody on a target cell and subsequently cause lysis of the target cell) activity of the antibodies. In other words, the heterodimeric antibodies encompassed by the disclosure herein include amino acid substitutions in each or both of the Fc monomeric domains of a parental sequence, usually IgG1, that can enhance ADCC.

[0286] In some embodiments, the Fc ADCC variants (e.g., ADCC-enhanced Fc variants) comprise amino acid substitution(s) selected from the group including: S239D, S239E, I332D, I332E, S239D/I332E, S239E/I332E, S239D/I332D, S239E/I332D, S239D/A330L/I332E, S239D/A330L, A330L/I332E, F243L, F243L/R292P/Y300L/V305I/P396L, I332E/P247I/A339Q, S298A/E333A, S298A/E333A/K334A, V264I/I332E, S298A, S298A/I332E, S239Q/I332E, D265G, Y296Q, S298T, L328I/I332E, V264T, V266I, S239D/I332N, S239E/I332N, S239E/I332Q, S239N/I332E, S239Q/I332D, K326E, A330Y/I332E, V264I/A330Y/I332E, A330L/I332E, V264I/A330L/I332E, L234D, L234E, L234I, L235D, L235T, A330F, L328V/I332E, S239Q/V264I/I332E, S239E/V264I/A330Y/I332E, K274R, N276Y, S324T, K334I, K334F, L234I/L235D, L235D/S239D/A330Y/I332E, S239D/V240I/A330Y/I332E, S239D/V264T/A330Y/I332E, S239D/K326E/A330Y/I332E, S239D/K326T/A330Y/I332E, E298R, S324G, E272R, P227G, G236S, D221K, H224E, K246H, D249Y, R255Y, E258H, T260H, G281D, E283H, E283L, V284E, S239D/3272I/I332E, S239D/E272Y/A330L/I332E, S239D/E272I/A330L/I332E, S239D/K274E/I332E, S239D/K326T/I332E, S239D/K326E/I332E and S239D/K274E/A330L/I332E, according to EU numbering. In some embodiments, the amino acid substitution(s) present in an Fc ADCC variants are selected from the group including: S239D, S239E, I332D, I332E, S239D/I332E, S239E/I332E, S239D/I332D, S239E/I332D, S239D/A330L/I332E, S239D/A330L, A330L/I332E, S239D/I332N, S239N/I332D, A330Y/I332E, A330L/I332E, L328V/I332E, L328T/I332E, S239Q/V264I/I332E, S239E/V264I/A330Y/I332E, L235D/S239D/A330Y/I332E, S239D/V240I/A330Y/I332E, S239D/V264T/A330Y/I332E, S239D/K326E/A330Y/I32E, S234D/K326T/A330Y/I332E, E274R, P227G, G236S, D221K, H224E, K246H, D249Y, R255Y, E258H, E258Y, T260H, E283H, E283L, V284E, S239D/3272I/I332E, S239D/E272Y/A330L/I332E, S239D/E272I/A330L/I332E, S239D/K274E/I332E, S239D/K326T/I332E, S239D/K326E/I332E and S239D/K274E/A330L/I332E, according to EU numbering.

[0287] In some embodiments, a first Fc domain and/or a second Fc domain of the bispecific antibody provided comprise an Fc ADCC variant selected from the group including: S239D, S239E, I332D, I332E, S239D/I332E, S239E/I332E, S239D/I332D, S239E/I332D, S239D/A330L/I332E, S239D/A330L, A330L/I332E, S239D/I332N, S239N/I332D, A330Y/I332E, A330L/I332E, L328V/I332E, L328T/I332E, S239Q/V264I/I332E, S239E/V264I/A330Y/I332E, L235D/S239D/A330Y/I332E, S239D/V240I/A330Y/I332E, S239D/V264T/A330Y/I332E, S239D/K326E/A330Y/I32E, S234D/K326T/A330Y/I332E, E274R, P227G, G236S, D221K, H224E, K246H, D249Y, R255Y, E258H, E258Y, T260H, E283H, E283L, V284E, S239D/3272I/I332E, S239D/E272Y/A330L/I332E, S239D/E272I/A330L/I332E, S239D/K274E/I332E, S239D/K326T/I332E, S239D/K326E/I332E and S239D/K274E/A330L/I332E, according to EU numbering.

[0288] In some embodiments, one or more of these variants can be included either in both of the Fc monomeric domains or in only one of the Fc monomeric domains of a heterodimeric antibody. In some embodiments, an anti-B7H3×anti-NKG2D bispecific antibody described includes ADCC-enhanced variants which includes one or more amino acid modifications in a first Fc domain and/or a second Fc domain, in other words, in the Fc domain of a first monomer, in the Fc domain of a second monomer, or in the Fc domains of both monomers. In some instances, a first Fc domain includes an Fc ADCC variant, and a second Fc domain does not include an Fc ADCC variant, resulting in an asymmetrical distribution of Fc ADCC variants. In other instances, a first Fc domain includes an Fc ADCC variant, and a second Fc domain includes an Fc ADCC variant. In one embodiment, the Fc ADCC variant of the first and second Fc domains can be the same amino acid substitution. Also, in one embodiment, the Fc ADCC variant of the first and second Fc domains can be different amino acid substitution.

[0289] In some embodiments, the Fc ADCC variants described bind with greater affinity to the FcγRIIIa (CD16A) human receptor. In some embodiments, the Fc variants have affinity for FcγRIIIa (CD16A) that is at least 1-fold, 5-fold, 10-fold, 100-fold, 200-fold, or 300-fold greater than that of the parental Fc domain.

[0290] In some embodiments, the Fc ADCC variants described can mediate effector function more effectively in the presence of effector cells. In some embodiments, the Fc variants mediate ADCC that is greater than that mediated by the parental Fc domain. In certain embodiments, the Fc variants mediate ADCC that is at least 5-fold, 10-fold, 20-fold, 30-fold, 40-fold, or 50-fold greater than that mediated by the parental Fc domain.

[0291] Additional detailed descriptions of Fc variants that may enhance ADCC are provided in WO2004/029207, which is expressly incorporated herein by reference in its entirety and specifically for the variants disclosed therein.

[0292] 1. Fc v90 Variants

[0293] In some embodiments, an Fc domain with enhanced binding to human FcγRIIIa (CD16A) and thus increased ADCC activity (“an Fc ADCC variant”) utilizes the amino acid substitutions S239D/I332E (sometimes referred to as the “v90 variants”) in the CH2 domain of one or both of the monomeric Fc domains, according to EU numbering. In some embodiments, a bispecific antibody described herein comprises the Fc v90 variants (e.g., amino acid substitutions S239D/I332E) in both Fc domains. In some embodiments, a bispecific antibody described herein comprises the Fc v90 variants in only one of the monomeric Fc domains. In some embodiments, the antibody comprises the Fc v90 variants in one of the monomeric Fc domains and lacks the Fc v90 variants in another Fc domain. In some embodiments, the antibody comprises the Fc v90 variants in an Fc domain and an amino acid substitution S239D in the CH2 domain of another Fc domain, according to EU numbering. In certain embodiments, the antibody comprises the Fc v90 variants in an Fc domain and an amino acid substitution I332E in the CH2 domain of another Fc domain, according to EU numbering. In some embodiments, the antibody comprises the Fc v90 variants in an Fc domain and lacks an amino acid substitution selected from S239D, I332E and S239D/I332E in the CH2 domain of another Fc domain, according to EU numbering. In some embodiments, one monomeric Fc domain comprises the S239D variant and the other comprises the I332E variant. In some embodiments, one monomeric Fc domain comprises the S239D variant and the other comprises no Fc ADCC variant. In some embodiments, one monomeric Fc domain comprises the I332E variant and the other comprises no Fc ADCC variant.

[0294] As will be appreciated by those in the art, in the case of these asymmetrical Fc ADCC variants, which monomer receives which variant(s) can be based on the “strandedness” outlined herein; that is, it may be useful to calculate the pI of different combinations and utilize the Fc ADCC variants such that the pIs of the two monomers are different to facilitate purification.

[0295] In some embodiments, monomer 1 comprises a first Fc v90 variants, and monomer 2 comprises the amino acid substitution S239D or I332E. In some embodiments, monomer 1 comprises the Fc V90 variants, and monomer 2 does not comprise the amino acid substitution(s) S239D, I332E or S239D/I332E. In some embodiments, at least one of the Fc domains of the bispecific antibody comprises the Fc v90 variants. A first Fc domain may comprise the Fc v90 variants, or it may comprise a parental sequence relative to the Fc v90 variants (e.g., a wild-type Fc domain, a Fc domain with one or more amino acid modifications that improves ADCC but does not include S239D, I332E or S239D/I332E substitutions, and the like). In such instances where at least one of the Fc domains comprises a parental sequence, relative to the Fc v90 variants, for the purposes of this section, this Fc domain may be referred to as a “WT Fc domain” with respect to the S239 and I332 positions of the Fc domain. In some embodiments, the antibody described herein comprises an Fc domain having an amino acid substitution of either S239D, I332E, or S239D/I332E, and another Fc domain having an amino acid substitution of either S239D, I332E, or S239D/I332E. In some embodiments, the antibody described herein comprises an Fc domain having an amino acid substitution of either S239D, I332E, or S239D/I332E, and another Fc domain without an amino acid substitution of either S239D, I332E, or S239D/I332E.

[0296] In some embodiments, the first Fc domain and the second Fc domain contain a set of ADCC-enhanced variant substitutions (first Fc domain variant:second Fc domain variant) selected from the group including: S239:I332E; S239D:S239D; S239D:WT; S239D:S239D/I332E; S239D/I332E:WT; S239D/I332E:S239D; S239D/I332E:I332E; S239D/I332E:S239D/I332E; I332E:WT; I332E:I332E; I332E:S239D; I332E:S239D/I332E; WT:S239D; WT:I332E; WT:S239D/I332E, according to EU numbering. In some embodiments, monomer 1 and monomer 2 contain a set of ADCC-enhanced variant substitutions (monomer 1 monomer 2) selected from the group including: S239:I332E; S239D:S239D; S239D:WT; S239D:S239D/I332E; S239D/I332E:WT; S239D/I332E:S239D; S239D/I332E:I332E; S239D/I332E:S239D/I332E; I332E:WT; I332E:I332E; I332E:S239D; I332E:S239D/I332E; WT:S239D; WT:I332E; WT:S239D/I332E, according to EU numbering.

[0297] In some embodiments, Fc domains with enhanced ADCC can further comprise one or more additional modifications at one or more of the following positions, including, but not limited to, 236, 243, 298, 299, or 330 in the CH2 domain, according to EU numbering. In some embodiments, the Fc variant domains comprise an amino acid substitution including, but not limited to: 236A, 243L, 298A, 299T, or 330L in the CH2 domain, according to EU numbering.

[0298] In some embodiments, an ADCC-enhanced Fc variant further includes, but is not limited, an amino acid substitution at one or more positions of the CH2 domain, according to EU numbering selected from the group including: position 236, 243, 298, 299, and 330. In some embodiments, an ADCC-enhanced Fc variant includes an amino acid substitution selected from the group including: 236A, 243L, 298A, 299T, 330L, 239D/332E, 236A/332E, 239D/332E/330L, 332E/330L, and any combination thereof in the CH2 domain, according to EU numbering. In some embodiments, the first Fc domain and/or the second Fc domain comprises an ADCC-enhanced Fc variant including, but not limited to, an amino acid substitution selected from the group including: 236A, 243L, 298A, 299T, 330L, 239D/332E, 236A/332E, 239D/332E/330L, 332E/330L, and any combination thereof in the CH2 domain, according to EU numbering, such that the Fc ADCC variant is the same in both Fc domain. Alternatively, the Fc ADCC variant is a different variant in each of the Fc domains.

[0299] Engineered antibodies comprising such ADCC-enhanced Fc variants can also have higher-affinity FcγRIIIa binding, thus resulting in stronger ADCC activity with NK cells. Bispecific antibodies having a variant Fc domain described herein can be useful and effective for NK cell-mediated killing of tumor cells.

[0300] 2. Fc Variants to Increase Binding to FcγRIIIa/CD16A

[0301] There are additional Fc substitutions that find use in enhancing FcγRIIIa binding. In some embodiments, the Fc domains of the bispecific antibodies provided include one or more Fc domains having increased binding to FcγRIIIa as compared to human IgG1 produced in standard research and production cell lines. In some embodiments, the Fc variants with improved binding affinity to at least FcγRIIIa have amino acid substitution(s) selected from the group including: V264I/I332E, S298A, S298A/I332E, S298A/E333A/K334A, S239Q/I332E, D265G, Y296Q, S298T, L328I/I332E, V264T, V266I, S239D/I332N, S239E/I332N, S239E/I332Q, S239N/I332E, S239Q/I332D, K326E, A330Y/I332E, V264I/A330Y/I332E, A330L/I332E, V264I/A330L/I332E, L234D, L234E, L234I, L235D, L235T, A330F, L328V/I332E, S239Q/V264I/I332E, S239E/V264I/A330Y/I332E, K274R, N276Y, S324T, K334I, K334F, L234I/L235D, L235D/S239D/A330Y/I332E, S239D/V240I/A330Y/I332E, S239D/V264T/A330Y/I332E, S239D/K326E/A330Y/I332E, S239D/K326T/A330Y/I332E, E298R, S324G, E272R, P227G, G236S, D221K, H224E, K246H, D249Y, R255Y, E258H, T260H, G281D, E283H, E283L, V284E, S239D/3272I/I332E, S239D/E272Y/A330L/I332E, S239D/E272I/A330L/I332E, S239D/K274E/I332E, S239D/K326T/I332E, S239D/K326E/I332E and S239D/K274E/A330L/I332E, according to EU numbering of the Fc domain. Additional Fc variants with enhanced binding affinity, specificity and/or avidity to FcγRIIIa are disclosed the specification and FIG. 41 of U.S. Pat. No. 8,188,231.

[0302] The described bispecific antibodies contain such Fc variants that provide enhanced effector function and substantial increases in affinity for FcγRIIIa. In some embodiments, the Fc variants improve binding to FcγRIIIa allotypes such as, for example, both V158 and F158 polymorphic forms of FcγRIIIa. The FcγR binding affinities of these Fc variants can be evaluated using assay recognized by those skilled in the art including, but not limited to, a Surface Plasmon Resonance (SPR) and/or a BLI binding assay (such as Biacore, Octet, or Carterra LSA).

[0303] B. Fc Variants for Increasing Binding to FcRn

[0304] Provided herein are additional Fc substitutions that find use in increased binding to the FcRn receptor and increased serum half-life, as specifically disclosed in U.S. Ser. No. 12/341,769, hereby incorporated by reference in its entirety, including, but not limited to, N434S, N434A, M428L, V308F, V259I, M428L/N434S, M428L/N434A, V259I/V308F, Y436I/M428L, Y436I/N434S, Y436V/N434S, Y436V/M428L, M252Y/S254T/T256E, and V259I/V308F/M428L. Such modification may be included in one or both Fc domains of the subject antibody.

[0305] In some embodiments, additional Fc variants can increase serum half-life of a bispecific antibody compared to a parental Fc domain. In some embodiments, the Fc variants have one or more amino acid modifications (i.e., substitutions, insertions or deletions) at one or more of the following amino acid residues or positions selected from the group including: 234, 235, 238, 250, 252, 254, 256, 265, 272, 286, 303, 305, 307, 311, 312, 317, 322, 340, 356, 360, 362, 376, 378, 380, 382, 413, 424, 428, and 434, according to EU numbering of the Fc region.

[0306] In some embodiments, the Fc variants have one or more amino acid substitutions selected from the group including: 234F, 235Q, 250E, 250Q, 252T, 252Y, 254T, 256E, 428L, 428F, 434S, 434A, 428L/434S, 428L/434A, 252Y/254T/256E, 234F/235Q/252T/254T/256E/322Q, 250E/428F, 250E/428L, 250Q/428F, and 250Q/428L, according to EU numbering.

[0307] In some embodiments, antibodies described can include M428L/N434S or M428L/N434A substitutions in one or both Fc domains, which can result in longer half-life in serum. In more embodiments, a first Fc domain or a second Fc domain include M428L/N434S substitutions. In more embodiments, a first Fc domain and a second Fc domain include M428L/N434S substitutions. In certain embodiments, a first Fc domain or a second Fc domain include M428L/N434A substitutions. In certain embodiments, a first Fc domain and a second Fc domain include M428L/N434A substitutions. Such substitutions can result in longer half-life in serum of molecules comprising such.

[0308] C. Fc Variants for Heterodimerization

[0309] In some embodiments, the anti-B7H3×anti-NKG2D bispecific antibodies provided herein are heterodimeric bispecific antibodies that include two variant Fc domain sequences. Such variant Fc domains include amino acid modifications to facilitate the self-assembly and/or purification of the heterodimeric antibodies.

[0310] An ongoing problem in antibody technologies is the desire for “bispecific” antibodies that bind to two different antigens simultaneously, in general thus allowing the different antigens to be brought into proximity and resulting in new functionalities and new therapies. In general, these antibodies are made by including genes for each heavy and light chain into the host cells. This generally results in the formation of the desired heterodimer (A-B), as well as the two homodimers (A-A and B-B (not including the light chain heterodimeric issues)). However, a major obstacle in the formation of bispecific antibodies is the difficulty in biasing the formation of the desired heterodimeric antibody over the formation of the homodimers and/or purifying the heterodimeric antibody away from the homodimers.

[0311] There are a number of mechanisms that can be used to generate the subject heterodimeric antibodies. In addition, as will be appreciated by those in the art, these different mechanisms can be combined to ensure high heterodimerization. Amino acid modifications that facilitate the production and purification of heterodimers are collectively referred to generally as “heterodimerization variants.” As discussed below, heterodimerization variants include “skew” variants (e.g., the “knobs and holes” and the “charge pairs” variants described below) as well as “pI variants,” which allow purification of heterodimers from homodimers. As is generally described in U.S. Pat. No. 9,605,084, hereby incorporated by reference in its entirety and specifically as below for the discussion of heterodimerization variants, useful mechanisms for heterodimerization include “knobs and holes” (“KIH”) as described in U.S. Pat. No. 9,605,084, “electrostatic steering” or “charge pairs” as described in U.S. Pat. No. 9,605,084, pI variants as described in U.S. Pat. No. 9,605,084, and general additional Fc variants as outlined in U.S. Pat. No. 9,605,084 and below.

[0312] Heterodimerization variants that are useful for the formation and purification of the subject heterodimeric antibodies away from homodimers are further discussed in detailed below.

[0313] There are a number of suitable pairs of sets of heterodimerization skew variants. These variants come in “pairs” of “sets”. That is, one set of the pair is incorporated into the first monomer and the other set of the pair is incorporated into the second monomer. It should be noted that these sets do not necessarily behave as “knobs in holes” variants, with a one-to-one correspondence between a residue on one monomer and a residue on the other; that is, these pairs of sets form an interface between the two monomers that encourages heterodimer formation and discourages homodimer formation, allowing the percentage of heterodimers that spontaneously form under biological conditions to be over 90%, rather than the expected 50% (25 homodimer A/A:50% heterodimer A/B25% homodimer B/B).

[0314] 1. Skew Variants

[0315] In some embodiments, the heterodimeric antibody includes skew (e.g., steric) variants which are one or more amino acid modifications in a first Fc domain (A) and/or a second Fc domain (B) that favor the formation of Fc heterodimers (Fc dimers that include the first and the second Fc domain; (A-B) over Fc homodimers (Fc dimers that include two of the first Fc domain or two of the second Fc domain; A-A or B-B). Suitable skew variants are included in the FIG. 29 of US Publ. App. No. 2016/0355608, hereby incorporated by reference in its entirety and specifically for its disclosure of skew variants, as well as in FIGS. 1A-1E.

[0316] Thus, suitable Fc heterodimerization variant pairs that will permit the formation of heterodimeric Fc regions are shown in the figures including FIGS. 1A-1E, 4, 7A-7C, 8A-8C, 35A-35D, and 49A-49D. Thus, a first Fc domain has first Fc heterodimerization variants and the second Fc domain has second Fc heterodimerization variants selected from the pairs in FIGS. 1A-1E, 7A-7C, 8A-8C, 35A-35D, and 49A-49D.

[0317] One mechanism is generally referred to in the art as “knobs and holes,” referring to amino acid engineering that creates steric influences to favor heterodimeric formation and disfavor homodimeric formation can also optionally be used; this is sometimes referred to as “knobs and holes,” as described in U.S. Ser. No. 61/596,846, Ridgway et al., Protein Engineering 9(7):617 (1996); Atwell et al., J. Mol. Biol. 1997 270:26; U.S. Pat. No. 8,216,805, all of which are hereby incorporated by reference in their entirety. The Figures identify a number of “monomer A-monomer B” pairs that rely on “knobs and holes”. In addition, as described in Merchant et al., Nature Biotech. 16:677 (1998), these “knobs and hole” mutations can be combined with disulfide bonds to skew formation to heterodimerization.

[0318] An additional mechanism that finds use in the generation of heterodimers is sometimes referred to as “electrostatic steering” as described in Gunasekaran et al., J. Biol. Chem. 285(25):19637 (2010), hereby incorporated by reference in its entirety. This mechanism is also sometimes referred to herein as “charge pairs”. In this embodiment, electrostatics are used to skew the formation towards heterodimerization. As those in the art will appreciate, these variants may also have an effect on pI, and thus on purification, and thus could in some cases also be considered pI variants. However, as these were generated to force heterodimerization and were not used as purification tools, they are classified as “steric variants”. These include, but are not limited to, D221E/P228E/L368E paired with D221R/P228R/K409R (e.g., these are “monomer corresponding sets) and C220E/P228E/368E paired with C220R/E224R/P228R/K409R. In some embodiments, the skew variants advantageously and simultaneously favor heterodimerization based on both the “knobs and holes” mechanism as well as the “electrostatic steering” mechanism. In some embodiments, the heterodimeric antibody includes one or more sets of such heterodimerization skew variants. These variants come in “pairs” of “sets”. That is, one set of the pair is incorporated into the first monomer and the other set of the pair is incorporated into the second monomer. It should be noted that these sets do not necessarily behave as “knobs in holes” variants, with a one-to-one correspondence between a residue on one monomer and a residue on the other. That is, these pairs of sets may instead form an interface between the two monomers that encourages heterodimer formation and discourages homodimer formation, allowing the percentage of heterodimers that spontaneously form under biological conditions to be over 90%, rather than the expected 50% (25% homodimer A/A:50% heterodimer A/B:25% homodimer B/B). Exemplary heterodimerization skew variants are depicted in FIGS. 1A-1E, 4, 7A-7C, 8A-8C, 35A-35D, and 49A-49D. Such skew variants include, but are not limited to: S364K/E357Q:L368D/K370S; L368D/K370S:S364K; L368E/K370S:S364K; T411E/K360E/Q362E:D401K; L368D/K370S:S364K/E357L; K370S:S364K/E357Q (EU numbering). In terms of nomenclature, the pair “S364K/E357Q:L368D/K370S” means that one of the monomers has the double variant set S364K/E357Q and the other has the double variant set L368D/K370S. In exemplary embodiments, the heterodimeric antibody includes Fc heterodimerization variants as sets: S364K/E357Q:L368D/K370S; L368D/K370S:S364K; L368E/K370S:S364K; T411E/K360E/Q362E:D401K; L368D/K370S:S364K/E357L; K370S:S364K/E357Q; or a T366S/L368A/Y407V:T366W (optionally including a bridging disulfide, T366S/L368A/Y407V/Y349C:T366W/S354C or T366S/L368A/Y407V/S354C:T366W/Y349C) are all skew variant amino acid substitution sets of Fc heterodimerization variants. In an exemplary embodiment, the heterodimeric antibody includes a “S364K/E357Q:L368D/K370S” amino acid substitution set. In terms of nomenclature, the pair “S364K/E357Q:L368D/K370S” means that one of the monomers includes an Fc domain that includes the amino acid substitutions S364K and E357Q and the other monomer includes an Fc domain that includes the amino acid substitutions L368D and K370S; as above, the “strandedness” of these pairs depends on the starting pI.

[0319] In some embodiments, the skew variants provided herein can be optionally and independently incorporated with any other modifications, including, but not limited to, other skew variants (see, e.g., in FIG. 37 of US Publ. App. No. 2012/0149876, herein incorporated by reference, particularly for its disclosure of skew variants), pI variants, isotypic variants, FcRn variants, ablation variants, etc. into one or both of the first and second Fc domains of the heterodimeric antibody. Further, individual modifications can also independently and optionally be included or excluded from the subject the heterodimeric antibody.

[0320] Additional monomer A and monomer B variants that can be combined with other variants, optionally and independently in any amount, such as pI variants outlined herein or other steric variants that are shown in FIG. 37 of US 2012/0149876, the figure and legend and SEQ ID NOs of which are incorporated expressly by reference herein.

[0321] In some embodiments, the steric variants outlined herein can be optionally and independently incorporated with any pI variant (or other variants such as, for example, Fc ADCC variants, FcRn variants, etc.) into one or both monomers, and can be independently and optionally included or excluded from the proteins of the antibodies described herein.

[0322] A subset of skew variants are “knobs in holes” (KIH) variants. Exemplary “knob-in-hole” variants are depicted in FIG. 7 of U.S. Pat. No. 8,216,805, which is incorporated herein by reference. Such “knob-in-hole” variants include, but are not limited to: an amino acid substitution at position 347, 349, 350, 351, 357, 366, 368, 370, 392, 394, 395, 397, 398, 399, 405, 407 and/or 409 of the CH3 constant domain of an IgG such as an IgG1, IgG2a, IgG2b, or IgG4 (Kabat numbering). In some embodiments, the “knob-in-hole” variants include, but are not limited to: an amino acid substitution at Y349, L351, E357, T366, L368, K370, N390, K392, T394, D399, S400, F405, Y407, K409, R409, T411, or any combination thereof of the CH3 domain of an IgG such as an IgG1, IgG2a, IgG2b, IgG4 (EU numbering). In some embodiments, the “knob-in-hole” variants include, but are not limited to: one or more amino acid substitutions including Y349D/E, L351D/K/Y, E357K, T366A/K/Y, L368E, K370E, N390D/K/R, K392E/F/L/M/R, T394W, D399K/R/W/Y, S400D/E/K/R, F405A/I/M/S/T/V/W, Y407A/Y, K409E/D/F, R409E/D/F, and T411D/E/K/N/Q/R/W.

[0323] In some embodiments, such variants include one or more amino acid substitutions including, but not limited to: Y349C, E357K, S354C, T366S, T366W, T366Y, L368A, K370E, T394S T394W, D399K, F405A, F405W, Y407A, Y407T, Y407V, R409D, T366Y/F405A, T394W/Y407T, T366W/F405W, T394S/Y407A, F405W/Y407A, and T366W/T394S (EU numbering). In some embodiments, these variants include knob:hole paired substitutions including, but not limited to: T366W:Y407V; S354C/T366W:Y349C/T366S/Y407V; Y349C/T366W:S354C/T366S/L368A/Y407V; Y349C/T366W/R409D/K370E:S354C/T366S/L368A/Y407V/D399K/E357K; R409D/K370E:D399K/E357K; T366W:T366S/L368A/Y407V; T366W/R409D/K370E:T366S/L368A/Y407V/D399K/E357K; T366W:T366S/L368A/Y407V; T366W/Y366Y:T366S/L368A/T394W/F405A/Y407V; Y349C/T366W:S354C/T366S/L368A/Y407V; Y349C/T366W/R409D/K370E:S354C/T366S/L368A/Y407V/D399K/E357K paired substitutions, according to EU numbering.

[0324] Additional exemplary “knob-in-hole” variants as described by the amino acid substitutions of the CH3 domains can be found in, for example, Carter et al., J. Immunol. Methods, 248(1-2):7-15 (2001), Merchant et al. Nat. Biotechnol. 16(7):677-81 (1998), Ridgway et al. Protein Eng. 9(7):617-2 (1996), and U.S. Pat. Nos. 8,216,805 and 10,287,352, the disclosures of which are herein incorporated by reference in their entireties.

[0325] 2. pI (Isoelectric Point) Variants for Heterodimers

[0326] In some embodiments, the heterodimeric antibody includes purification variants that advantageously allow for the separation of heterodimeric antibody (e.g., anti-B7H3×anti-NKG2D bispecific antibody) from homodimeric proteins.

[0327] There are several basic mechanisms that can lead to ease of purifying heterodimeric antibodies. For example, modifications to one or both of the antibody heavy chain monomers A and B such that each monomer has a different pI allows for the isoelectric purification of heterodimeric A-B antibody from monomeric A-A and B-B proteins. Alternatively, some scaffold formats, such as the “1+1 Fab-scFv-Fc” format and the “2+1 Fab₂-scFv-Fc” format, also allows separation on the basis of size. As described above, it is also possible to “skew” the formation of heterodimers over homodimers using skew variants. Thus, a combination of heterodimerization skew variants and pI variants find particular use in the heterodimeric antibodies provided herein.

[0328] Additionally, as more fully outlined below, depending on the format of the heterodimeric antibody, pI variants either contained within the constant region and/or Fc domains of a monomer, and/or domain linkers can be used. In some embodiments, the heterodimeric antibody includes additional modifications for alternative functionalities that can also create pI changes, such as Fc, FcRn and KO variants.

[0329] In some embodiments, the subject heterodimeric antibodies provided herein include at least one monomer with one or more modifications that alter the pI of the monomer (i.e., a “pI variant”). In general, as will be appreciated by those in the art, there are two general categories of pI variants: those that increase the pI of the protein (basic changes) and those that decrease the pI of the protein (acidic changes). As described herein, all combinations of these variants can be done: one monomer may be wild type, or a variant that does not display a significantly different pI from wild-type, and the other can be either more basic or more acidic. Alternatively, each monomer is changed, one to more basic and one to more acidic.

[0330] Depending on the format of the heterodimer antibody, pI variants can be either contained within the constant and/or Fc domains of a monomer, or charged linkers, either domain linkers or scFv linkers, can be used. That is, antibody formats that utilize scFv(s) such as “1+1 Fab-scFv-Fc,” format can include charged scFv linkers (either positive or negative), that give a further pI boost for purification purposes. As will be appreciated by those in the art, some 1+1 Fab-scFv-Fc formats are useful with just charged scFv linkers and no additional pI adjustments, although the antibodies described herein do provide pI variants that are on one or both of the monomers, and/or charged domain linkers as well. In addition, additional amino acid engineering for alternative functionalities may also confer pI changes, such as Fc, FcRn and KO variants.

[0331] In subject heterodimeric antibodies for which pI is used as a separation mechanism to allow the purification of heterodimeric proteins, amino acid variants are introduced into one or both of the monomer polypeptides. That is, the pI of one of the monomers (referred to herein for simplicity as “monomer A”) can be engineered away from monomer B, or both monomer A and B can be changed, with the pI of monomer A increasing and the pI of monomer B decreasing. As is outlined more fully below, the pI changes of either or both monomers can be done by removing or adding a charged residue (e.g., a neutral amino acid is replaced by a positively or negatively charged amino acid residue, e.g., glycine to glutamic acid), changing a charged residue from positive or negative to the opposite charge (e.g., aspartic acid to lysine) or changing a charged residue to a neutral residue (e.g., loss of a charge; lysine to serine). A number of these pI variants are shown in the FIGS. 1A-1E, 2, 4, 7A-7E, 8A-8C, 35A-35D, and 49A-49D.

[0332] Thus, in some embodiments, the subject heterodimeric antibody includes amino acid modifications in the constant regions that alter the isoelectric point (pI) of at least one, if not both, of the monomers of a dimeric protein to form “pI antibodies”) by incorporating amino acid substitutions (“pI variants” or “pI substitutions”) into one or both of the monomers. As shown herein, the separation of the heterodimers from the two homodimers can be accomplished if the pIs of the two monomers differ by as little as 0.1 pH unit, with 0.2, 0.3, 0.4 and 0.5 or greater all finding use in the antibodies described herein.

[0333] As will be appreciated by those in the art, the number of pI variants to be included on each or both monomer(s) to achieve good separation will depend in part on the starting pI of the components, for example in the 1+1 Fab-scFv-Fc and 2+1 Fab₂-scFv-Fc formats, the starting pI of the scFv and Fab(s) of interest. That is, to determine which monomer to engineer or in which “direction” (e.g., more positive, or more negative), the Fv sequences of the two target antigens are calculated and a decision is made from there. As is known in the art, different Fvs will have different starting pIs which are exploited in the antibodies described herein. In general, as outlined herein, the pIs are engineered to result in a total pI difference of each monomer of at least about 0.1 logs, with 0.2 to 0.5 being preferred as outlined herein.

[0334] In the case where pI variants are used to achieve heterodimerization, by using the constant region(s) of the heavy chain(s), a more modular approach to designing and purifying bispecific proteins, including antibodies, is provided. Thus, in some embodiments, heterodimerization variants (including skew and pI heterodimerization variants) are not included in the variable regions, such that each individual antibody must be engineered. In addition, in some embodiments, the possibility of immunogenicity resulting from the pI variants is significantly reduced by importing pI variants from different IgG isotypes such that pI is changed without introducing significant immunogenicity. Thus, an additional problem to be solved is the elucidation of low pI constant domains with high human sequence content, e.g., the minimization or avoidance of non-human residues at any particular position. Alternatively, or in addition to isotypic substitutions, the possibility of immunogenicity resulting from the pI variants is significantly reduced by utilizing isosteric substitutions (e.g., Asn to Asp; and Gln to Glu).

[0335] As discussed below, a side benefit that can occur with this pI engineering is also the extension of serum half-life and increased FcRn binding. That is, as described in US Publ. App. No. US 2012/0028304 (incorporated by reference in its entirety), lowering the pI of antibody constant domains (including those found in antibodies and Fc fusions) can lead to longer serum retention in vivo. These pI variants for increased serum half-life also facilitate pI changes for purification.

[0336] In addition, it should be noted that the pI variants give an additional benefit for the analytics and quality control process of bispecific antibodies, as the ability to either eliminate, minimize, and distinguish when homodimers are present is significant. Similarly, the ability to reliably test the reproducibility of the heterodimeric antibody production is important.

[0337] In general, embodiments of particular use rely on sets of variants that include skew variants, which encourage heterodimerization formation over homodimerization formation, coupled with pI variants, which increase the pI difference between the two monomers to facilitate purification of heterodimers away from homodimers.

[0338] Exemplary combinations of pI variants are shown in FIGS. 4 and 5, and FIG. 30 of US Publ. App. No. 2016/0355608, all of which are herein incorporated by reference in its entirety and specifically for the disclosure of pI variants. Preferred combinations of pI variants are shown in FIGS. 1A-1E, 2 and 4. As outlined herein and shown in the figures, these changes are shown relative to IgG1, but all isotypes can be altered this way, as well as isotype hybrids. In the case where the heavy chain constant domain is from IgG2-4, R133E and R133Q can also be used.

[0339] In one embodiment, a preferred combination of pI variants has one monomer (the negative Fab side) comprising 208D/295E/384D/418E/421D variants (N208D/Q295E/N384D/Q418E/N421D when relative to human IgG1) and a second monomer (the positive scFv side) comprising a positively charged scFv linker, including (GKPGS)4 (SEQ ID NO: 1). However, as will be appreciated by those in the art, the first monomer includes a CH1 domain, including position 208. Accordingly, in constructs that do not include a CH1 domain (for example for fusion proteins that do not utilize a CH1 domain on one of the domains), a preferred negative pI variant Fc set includes 295E/384D/418E/421D variants (Q295E/N384D/Q418E/N421D when relative to human IgG1).

[0340] Accordingly, in some embodiments, one monomer has a set of substitutions from FIG. 2 and the other monomer has a charged linker (either in the form of a charged scFv linker because that monomer comprises an scFv or a charged domain linker, as the format dictates, which can be selected from those depicted in FIG. 5).

[0341] In some embodiments, modifications are made in the hinge of the Fc domain, including positions 216, 217, 218, 219, 220, 221, 222, 223, 224, 225, 226, 227, 228, 229, and 230 based on EU numbering. Thus, pI mutations and particularly substitutions can be made in one or more of positions 216-230, with 1, 2, 3, 4 or 5 mutations finding use. Again, all possible combinations are contemplated, alone or with other pI variants in other domains.

[0342] Specific substitutions that find use in lowering the pI of hinge domains include, but are not limited to, a deletion at position 221, a non-native valine or threonine at position 222, a deletion at position 223, a non-native glutamic acid at position 224, a deletion at position 225, a deletion at position 235 and a deletion or a non-native alanine at position 236. In some cases, only pI substitutions are done in the hinge domain, and in others, these substitution(s) are added to other pI variants in other domains in any combination.

[0343] In some embodiments, mutations can be made in the CH2 region, including positions 233, 234, 235, 236, 274, 296, 300, 309, 320, 322, 326, 327, 334 and 339, based on EU numbering. It should be noted that changes in 233-236 can be made to increase effector function (along with 327A) in the IgG2 backbone. Again, all possible combinations of these 14 positions can be made; e.g., may include a variant Fc domain with 1, 2, 3, 4, 5, 6, 7, 8, 9 or 10 CH2 pI substitutions.

[0344] Specific substitutions that find use in lowering the pI of CH2 domains include, but are not limited to, a non-native glutamine or glutamic acid at position 274, a non-native phenylalanine at position 296, a non-native phenylalanine at position 300, a non-native valine at position 309, a non-native glutamic acid at position 320, a non-native glutamic acid at position 322, a non-native glutamic acid at position 326, a non-native glycine at position 327, a non-native glutamic acid at position 334, a non-native threonine at position 339, and all possible combinations within CH2 and with other domains.

[0345] In this embodiment, the modifications can be independently and optionally selected from position 355, 359, 362, 384, 389, 392, 397, 418, 419, 444 and 447 (EU numbering) of the CH3 region. Specific substitutions that find use in lowering the pI of CH3 domains include, but are not limited to, a non-native glutamine or glutamic acid at position 355, a non-native serine at position 384, a non-native asparagine or glutamic acid at position 392, a non-native methionine at position 397, a non-native glutamic acid at position 419, a non-native glutamic acid at position 359, a non-native glutamic acid at position 362, a non-native glutamic acid at position 389, a non-native glutamic acid at position 418, a non-native glutamic acid at position 444, and a deletion or non-native aspartic acid at position 447.

[0346] 3. Isotypic Variants

[0347] In addition, many embodiments of the antibodies described herein rely on the “importation” of pI amino acids at particular positions from one IgG isotype into another, thus reducing or eliminating the possibility of unwanted immunogenicity being introduced into the variants. A number of these are shown in FIG. 21 of U.S. Publ. App. No. 2014/0370013, hereby incorporated by reference. That is, IgG1 is a common isotype for therapeutic antibodies for a variety of reasons, including high effector function. However, the heavy constant region of IgG1 has a higher pI than that of IgG2 (8.10 versus 7.31). By introducing IgG2 residues at particular positions into the IgG1 backbone, the pI of the resulting monomer is lowered (or increased) and additionally exhibits longer serum half-life. For example, IgG1 has a glycine (pI 5.97) at position 137, and IgG2 has a glutamic acid (pI 3.22); importing the glutamic acid will affect the pI of the resulting protein. As is described below, a number of amino acid substitutions are generally required to significant affect the pI of the variant antibody. However, it should be noted as discussed below that even changes in IgG2 molecules allow for increased serum half-life.

[0348] In other embodiments, non-isotypic amino acid changes are made, either to reduce the overall charge state of the resulting protein (e.g., by changing a higher pI amino acid to a lower pI amino acid), or to allow accommodations in structure for stability, etc. as is further described below.

[0349] In addition, by pI engineering both the heavy and light constant domains, significant changes in each monomer of the heterodimer can be seen. As discussed herein, having the pIs of the two monomers differ by at least 0.5 can allow separation by ion exchange chromatography or isoelectric focusing, or other methods sensitive to isoelectric point.

[0350] 4. Calculating pI

[0351] The pI of each monomer can depend on the pI of the variant heavy chain constant domain and the pI of the total monomer, including the variant heavy chain constant domain and the fusion partner. Thus, in some embodiments, the change in pI is calculated on the basis of the variant heavy chain constant domain, using the chart in the FIG. 19 of U.S. Publ. App. No. 2014/0370013. As discussed herein, which monomer to engineer is generally decided by the inherent pI of the Fv and scaffold regions. Alternatively, the pI of each monomer can be compared.

[0352] 5. pI Variants that Also Confer Better FcRn In Vivo Binding

[0353] In the case where the pI variant decreases the pI of the monomer, they can have the added benefit of improving serum retention in vivo.

[0354] Although still under examination, Fc regions are believed to have longer half-lives in vivo, because binding to FcRn at pH 6 in an endosome sequesters the Fc (Ghetie and Ward, 1997, Immunol Today, 18(12): 592-598, entirely incorporated by reference). The endosomal compartment then recycles the Fc to the cell surface. Once the compartment opens to the extracellular space, the higher pH 7.4, induces the release of Fc back into the blood. In mice, Dall'Acqua et al. showed that Fc mutants with increased FcRn binding at pH 6 and pH 7.4 actually had reduced serum concentrations and the same half-life as wild-type Fc (Dall'Acqua et al., 2002, J. Immunol. 169:5171-5180, entirely incorporated by reference). The increased affinity of Fc for FcRn at pH 7.4 is thought to forbid the release of the Fc back into the blood. Therefore, the Fc mutations that will increase Fc's half-life in vivo will ideally increase FcRn binding at the lower pH while still allowing release of Fc at higher pH. The amino acid histidine changes its charge state in the pH range of 6.0 to 7.4. Therefore, it is not surprising to find His residues at important positions in the Fc/FcRn complex.

[0355] Recently it has been suggested that antibodies with variable regions that have lower isoelectric points may also have longer serum half-lives (Igawa et al., 2010, PEDS, 23(5): 385-392, entirely incorporated by reference). However, the mechanism of this is still poorly understood. Moreover, variable regions differ from antibody to antibody. Constant region variants with reduced pI and extended half-life would provide a more modular approach to improving the pharmacokinetic properties of antibodies, as described herein.

[0356] 6. Additional Fc Variants for Additional Functionality

[0357] In addition to the heterodimerization variants discussed above, there are a number of useful Fc amino acid modification that can be made for a variety of reasons, including, but not limited to, altering binding to one or more FcγR receptors, altered binding to FcRn receptors, etc., as discussed herein.

[0358] Accordingly, the antibodies provided herein (heterodimeric, as well as homodimeric) can include such amino acid modifications with or without the heterodimerization variants outlined herein (e.g., the pI variants and steric variants). Each set of variants can be independently and optionally included or excluded from any particular heterodimeric protein.

[0359] 7. Additional Heterodimerization Variants

[0360] In some embodiments, the first Fc domain comprises one or more amino acid substitutions selected from the group including: L351Y, D399R, D399K, S400D, S400E, S400R, S400K, F405A, F405I, F405M, F405T, F405S, F405V, F405W, Y407A, Y407I, Y407L, Y407V, and any combination thereof, and the second Fc domain comprises one or more amino acid substitutions selected from the group including: T350V, T366A, T366I, T366L, T366M, T366Y, T366S, T366C, T366V, T366W, N390D, N390E, N390R, K392L, K392M, K392I, K392D, K392E, T394W, K409F, K409W, T411N, T411R, T411Q, T411K, T411D, T411E, T411W, and any combination thereof.

[0361] In some embodiments, other heterodimerization pair variants include, but are not limited to, amino acid substitutions of L234A/L235A:wildtype; L234A/L235A:L234K/L235K; L234D/L235E:L234K/L235K; E233A/L234D/L235E:E233A/L234R/L235R; L234D/L235E:E233K/L234R/L235R; E233A/L234K/L235A:E233K/L234A/L235K; E269Q/D270N:E269K/D270R; and WT:L235K/A327K of the CH2 domain, according to the EU numbering.

[0362] In some embodiments, the first and/or second Fc domains comprise one or more amino acid substitutions selected from the group including: S239D, D265S, S267D, E269K, S298A, K326E, A330L and I332E. In certain instances, the Fc paired variants include, but are not limited to, S239D/D265S/I332E/E269K:S239D/D265S/S298A; S239D/K326E/A330L/I332E:S298A or S239D/K326E/A330L/I332E/E269K:S298A of the CH2 domain, according to EU numbering.

[0363] Additional descriptions of useful heterodimeric variants are disclosed in U.S. Pat. Nos. 9,732,155; 10,457,742 and 10,875,931 and U.S. Publ. App. Nos. 2021/0277150 and 2020/0087414, the disclosures of which, including the description of Fc domain variants are herein incorporated by reference in their entireties.

[0364] D. Ablation Variants

[0365] While in general NK engager multispecific antibodies retain at binding to CD16A (including “wild type” binding or increased binding to CD16A as outlined above), in some cases, surprisingly, NK engager activity can be seen even when binding to CD16A has been reduced or ablated. Accordingly, provided is another category of functional Fc variants to include are “FcγR ablation variants” or “Fc knock out (FcKO or KO)” variants. In these embodiments, it is desirable to reduce or remove the normal binding of the Fc domain to one or more or all of the Fcγ receptors (e.g., FcγR1, FcγRIIa, FcγRIIb, FcγRIIIa, etc.) to avoid additional mechanisms of action. That is, for example, in many embodiments, particularly in the use of bispecific antibodies that bind a target antigen monovalently it is generally desirable to ablate FcγRIIIa binding to eliminate or significantly reduce ADCC activity. Wherein one of the Fc domains comprises one or more Fcγ receptor ablation variants. These ablation variants are depicted in FIG. 3, and each can be independently and optionally included or excluded, with preferred aspects utilizing ablation variants selected from the group including G236R/L328R, E233P/L234V/L235A/G236del/S239K, E233P/L234V/L235A/G236del/S267K, E233P/L234V/L235A/G236del/S239K/A327G, E233P/L234V/L235A/G236del/S267K/A327G and E233P/L234V/L235A/G236del. It should be noted that the ablation variants referenced herein ablate FcγR binding but generally not FcRn binding.

[0366] As is known in the art, the Fc domain of human IgG1 has the highest binding to the Fc receptors, and thus ablation variants can be used when the constant domain (or Fc domain) in the backbone of the heterodimeric antibody is IgG1. Alternatively, or in addition to ablation variants in an IgG1 background, mutations at the glycosylation position 297 (generally to A or S) can significantly ablate binding to FcγRIIIa, for example. Human IgG2 and IgG4 have naturally reduced binding to the Fcγ receptors, and thus those backbones can be used with or without the ablation variants.

[0367] E. Combination of Heterodimeric and Fc Variants

[0368] As will be appreciated by those in the art, all of the recited heterodimerization variants (including skew and/or pI variants) can be optionally and independently combined in any way, as long as they retain their “strandedness” or “monomer partition”. In addition, all of these variants can be combined into any of the heterodimerization formats.

[0369] In the case of pI variants, while embodiments finding particular use are shown in the Figures, other combinations can be generated, following the basic rule of altering the pI difference between two monomers to facilitate purification.

[0370] In addition, any of the heterodimerization variants, skew, and pI, are also independently and optionally combined with Fc ADCC variants, Fc variants, FcRn variants, or Fc ablation variants, as generally outlined herein.

[0371] Exemplary combination of variants that are included in some embodiments of the heterodimeric 1+1 Fab-scFv-Fc and 2+1 Fab₂-scFv-Fc format antibodies are included in FIG. 4. In certain embodiments, the anti-B7H3×anti-NKG2D antibody is a heterodimeric 1+1 Fab-scFv-Fc or 2+1 Fab₂-scFv-Fc format antibody as shown in FIG. 15.

[0372] Accordingly, the antibodies provided herein (heterodimeric, as well as homodimeric) can include such amino acid modifications with or without the heterodimerization variants outlined herein (e.g., the pI variants and steric variants). Each set of variants can be independently and optionally included or excluded from any particular heterodimeric protein.

[0373] F. Afucosylated Fc Domains

[0374] In some embodiments, the increased binding of a Fc domain to CD16A is the result of producing the NKE in a cell line that reduces or eliminates the incorporation of fucose into the glycosylation of the NKE. See, for example, Pereira et al., MAbs (2018) 10(5):693-711.

[0375] In some embodiments, antibodies comprising Fc domains described are produced in a host cell such that the Fc domains have reduced fucosylation or no fucosylation compared to a parental Fc domain. In some instances, antibodies described are produced in a genetically modified host cell, wherein the genetic modification to the host cell results in the overexpression of β(1,4)-N-acetylglucosaminyltransferase III (GnTIII), a glycosyltransferase catalyzing the formation of bisected oligosaccharides, which are generally also non-fucosylated. N-glycosylation of the Fc domain can play a role in binding to FcγR; and afucosylation of the N-glycan can increase the binding capacity of the Fc domain to FcγRIIIa. As discussed in further detail above, an increase in FcγRIIIa binding can enhance ADCC, which can be advantageous in certain antibody therapeutic applications in which cytotoxicity is desirable.

[0376] In some embodiments, an Fc domain is engineered such that it has reduced fucosylation or no fucosylation, compared to a parental Fc domain. In the context of an Fc domain, the terms “afucosylation,” “afucosylated,” “defucosylation,” and “defucosylated” are used interchangeably, and generally refer to the absence or removal of core-fucose from the N-glycan attached to the CH2 domain of an Fc domain. For instance, an afucosylated antibody lacks core fucosylation in the Fc domain. As used herein, the phrase “a low level of fucosylation” or “reduced fucosylation” generally refers to an overall fucosylation level in a specific Fc domain that is no more than about 10.0%, no more than 5.0%, no more than 2.5%, no more than 1.0%, no more than about 0.5%, no more than 0.25%, no more than about 0.1%, or no more than 0.01%, compared to the fucosylation level of parental Fc domain. The term “% fucosylation” generally refers to the level of fucosylation in a specific Fc domain compared to that of a parental Fc domain. The % fucosylation can be measured according to any suitable method known in the relevant art, such as, for example, by mass spectrometry (MS), HPLC-Chip Cube MS (Agilent), and reverse phase-HPLC.

[0377] In some embodiments, a particular level of fucosylation is desired. In some embodiments, a Fc variant is provided, wherein the Fc variant comprises a particular level of afucosylation. In some further embodiments, the fucosylation level of the Fc variant is no more than about 10.0%, no more than about 9.0%, no more than about 8.0%, no more than about 7.0%, no more than about 6.0%, no more than about 5.0%, no more than about 4.0%, no more than about 3.0%, no more than about 2.0%, no more than about 1.5%, no more than about 1.0%, no more than about 0.5%, no more than 0.25%, no more than about 0.1%, or no more than 0.01%, compared to that of a parental Fc domain.

[0378] In some embodiments, antibodies comprising afucosylated Fc domains can be enriched (to obtain a particular level of afucosylation) by affinity chromatography using resins conjugated with a fucose binding moiety, such as, for example, an antibody or lectin specific for fucose, with some embodiments finding particular utility when fucose is present in a 1-6 linkage (see, e.g., Kobayashi et al., 2012, J. Biol. Chem. 287:33973-82).

[0379] In some embodiments, the fucosylated species of the Fc domain can be separated from the afucosylated species of the Fc domain (to obtain a particular level of afucosylation) using an anti-fucose specific antibody in an affinity column. Alternatively, or in addition to, afucosylated species can be separated from fucosylated species based on the differential binding affinity to FcγRIIIa using affinity chromatography (again, to obtain a particular level of afucosylation).

### (ii) NKG2D Antigen Binding Domains

[0380] In one aspect, provided herein are NKG2D antigen binding domains (ABDs) and compositions that include such NKG2D antigen binding domains (ABDs), including anti-NKG2D×anti-B7H3 bispecific antibodies. Such NKG2D binding domains and related antibodies find use, for example, in the treatment of B7H3 associated cancers. It is recognized that the NKG2D ABDs are capable of binding to the extracellular domain (ECD) of human NKG2D.

[0381] Suitable NKG2D binding domain can comprise a set of 6 CDRs (VHCDR1-3 and VLCDR1-3) or V_{H} and V_{L} domains as are depicted in the figures including FIGS. 23A, 23B and 58A-58J as well as the corresponding sequences in the sequence listing. The sequence listing also includes sequences of additional V_{H}/V_{L} pairs for binding NKG2D, as recognized by those skilled in the art. In some embodiments, the NKG2D ABD has a set of vhCDRs selected from the vhCDR1, vhCDR2 and vhCDR3 sequences from a V_{H} selected from the group including: 1D7B4[NKG2D]_H1, 1D2B4[NKG2D]_H0, mAb-C[NKG2D]_H0, and mAb-D[NKG2D]_H0, as shown in FIGS. 23A and 23B. In many embodiments, the NKG2D ABD has a set of vhCDRs selected from the set of vhCDR1, vhCDR2 and vhCDR3 sequences selected from the group including: SEQ ID NOS:17-19, SEQ ID NOS:33-35, SEQ ID NOS:2604-2606, SEQ ID NOS:2612-2614, as shown in FIGS. 23A and 23B.

[0382] In some embodiments, the NKG2D ABD has a set of vhCDRs selected from the vhCDR1, vhCDR2 and vhCDR3 sequences from a V_{H} selected from the group including: 1D7B4[NKG2D]_H1.1; 1D7B4[NKG2D]_H1.2; 1D7B4[NKG2D]_H1.3; 1D7B4[NKG2D]_H1.4; 1D7B4[NKG2D]_H1.5; 1D7B4[NKG2D]_H1.6; 1D7B4[NKG2D]_H1.7; 1D7B4[NKG2D]_H1.8; 1D7B4[NKG2D]_H1.9; 1D7B4[NKG2D]_H1.10; 1D7B4[NKG2D]_H1.11; 1D7B4[NKG2D]_H1.12; 1D7B4[NKG2D]_H1.13; 1D7B4[NKG2D]_H1.14; 1D7B4[NKG2D]_H1.15; 1D7B4[NKG2D]_H1.16; 1D7B4[NKG2D]_H1.17; 1D7B4[NKG2D]_H1.18; 1D7B4[NKG2D]_H1.19; 1D7B4[NKG2D]_H1.20; 1D7B4[NKG2D]_H1.21; 1D7B4[NKG2D]_H1.22; 1D7B4[NKG2D]_H1.23; 1D7B4[NKG2D]_H1.24; 1D7B4[NKG2D]_H1.25; 1D7B4[NKG2D]_H1.26; 1D7B4[NKG2D]_H1.27; 1D7B4[NKG2D]_H1.28; 1D7B4[NKG2D]_H1.29; 1D7B4[NKG2D]_H1.30; 1D7B4[NKG2D]_H1.31; 1D7B4[NKG2D]_H1.32; 1D7B4[NKG2D]_H1.33; 1D7B4[NKG2D]_H1.34; 1D7B4[NKG2D]_H1.35; 1D7B4[NKG2D]_H1.36; 1D7B4[NKG2D]_H1.37; 1D7B4[NKG2D]_H1.38; 1D7B4[NKG2D]_H1.39; 1D7B4[NKG2D]_H1.40; 1D7B4[NKG2D]_H1.41; 1D7B4[NKG2D]_H1.42; 1D7B4[NKG2D]_H1.43; 1D7B4[NKG2D]_H1.44; 1D7B4[NKG2D]_H1.45; 1D7B4[NKG2D]_H1.46; 1D7B4[NKG2D]_H1.47; 1D7B4[NKG2D]_H1.48; SEQ ID NOS:1212, 18 and 19; SEQ ID NOS:1214, 18 and 19; SEQ ID NOS:1216, 18 and 19; SEQ ID NOS:1218, 18 and 19; SEQ ID NOS:1219, 18 and 19; SEQ ID NOS:1220, 18 and 19; SEQ ID NOS:1222, 18 and 19; SEQ ID NOS:1224, 18 and 19; SEQ ID NOS:1226, 18 and 19; SEQ ID NOS:17, 18 and 1228; SEQ ID NOS:17, 18 and 1230; SEQ ID NOS:17, 18 and 1232; SEQ ID NOS:17, 18 and 1234; SEQ ID NOS:17, 18 and 1236; SEQ ID NOS:17, 18 and 1238; SEQ ID NOS:17, 18 and 1240; SEQ ID NOS:17, 18 and 1242; SEQ ID NOS:17, 18 and 1244; SEQ ID NOS:17, 18 and 1246; SEQ ID NOS:17, 18 and 1248; SEQ ID NOS:17, 18 and 1250; SEQ ID NOS:17, 18 and 1252; SEQ ID NOS:17, 18 and 1254; SEQ ID NOS:17, 18 and 1256; SEQ ID NOS:17, 18 and 1258; SEQ ID NOS:17, 18 and 1260; SEQ ID NOS:17, 18 and 1262; SEQ ID NOS:17, 18 and 1264; SEQ ID NOS:17, 18 and 1266; SEQ ID NOS:17, 18 and 1268; SEQ ID NOS:17, 18 and 1270; SEQ ID NOS:17, 18 and 1272; SEQ ID NOS:17, 18 and 1274; SEQ ID NOS:17, 18 and 1276; SEQ ID NOS:17, 18 and 1278; SEQ ID NOS:17, 18 and 1280; SEQ ID NOS:17, 18 and 1282; SEQ ID NOS:17, 18 and 1284; SEQ ID NOS:17, 18 and 1286; SEQ ID NOS:17, 18 and 1288; SEQ ID NOS:17, 18 and 1290; SEQ ID NOS:17, 18 and 1292; SEQ ID NOS:17, 18 and 1294; SEQ ID NOS:17, 18 and 1296; SEQ ID NOS:17, 18 and 1298; SEQ ID NOS:17, 18 and 1300; SEQ ID NOS:17, 18 and 1302; SEQ ID NOS:17, 18 and 1304; SEQ ID NOS:17, 18 and 1306, as shown in FIGS. 58A-58J.

[0383] In some embodiments, the V_{H} domain of the NKG2D ABD is selected from the group including: 1D7B4[NKG2D]_H1, 1D2B4[NKG2D]_H0, mAb-C[NKG2D]_H0, mAb-D[NKG2D]_H0, and SEQ ID NOS:50, 52, 2603 and 2611, as shown in FIGS. 23A and 23B.

[0384] In many embodiments, the V_{H} domain of the NKG2D ABD is selected from the group including: 1D7B4[NKG2D]_H1.1; 1D7B4[NKG2D]_H1.2; 1D7B4[NKG2D]_H1.3; 1D7B4[NKG2D]_H1.4; 1D7B4[NKG2D]_H1.5; 1D7B4[NKG2D]_H1.6; 1D7B4[NKG2D]_H1.7; 1D7B4[NKG2D]_H1.8; 1D7B4[NKG2D]_H1.9; 1D7B4[NKG2D]_H1.10; 1D7B4[NKG2D]_H1.11; 1D7B4[NKG2D]_H1.12; 1D7B4[NKG2D]_H1.13; 1D7B4[NKG2D]_H1.14; 1D7B4[NKG2D]_H1.15; 1D7B4[NKG2D]_H1.16; 1D7B4[NKG2D]_H1.17; 1D7B4[NKG2D]_H1.18; 1D7B4[NKG2D]_H1.19; 1D7B4[NKG2D]_H1.20; 1D7B4[NKG2D]_H1.21; 1D7B4[NKG2D]_H1.22; 1D7B4[NKG2D]_H1.23; 1D7B4[NKG2D]_H1.24; 1D7B4[NKG2D]_H1.25; 1D7B4[NKG2D]_H1.26; 1D7B4[NKG2D]_H1.27; 1D7B4[NKG2D]_H1.28; 1D7B4[NKG2D]_H1.29; 1D7B4[NKG2D]_H1.30; 1D7B4[NKG2D]_H1.31; 1D7B4[NKG2D]_H1.32; 1D7B4[NKG2D]_H1.33; 1D7B4[NKG2D]_H1.34; 1D7B4[NKG2D]_H1.35; 1D7B4[NKG2D]_H1.36; 1D7B4[NKG2D]_H1.37; 1D7B4[NKG2D]_H1.38; 1D7B4[NKG2D]_H1.39; 1D7B4[NKG2D]_H1.40; 1D7B4[NKG2D]_H1.41; 1D7B4[NKG2D]_H1.42; 1D7B4[NKG2D]_H1.43; 1D7B4[NKG2D]_H1.44; 1D7B4[NKG2D]_H1.45; 1D7B4[NKG2D]_H1.46; 1D7B4[NKG2D]_H1.47; 1D7B4[NKG2D]_H1.48; SEQ ID NOS:1211, 1213, 1215, 1217, 1219, 1221, 1223, 1225, 1227, 1229, 1231, 1233, 1235, 1237, 1239, 1241, 1243, 1245, 1247, 1249, 1251, 1253, 1255, 1257, 1259, 1261, 1263, 1265, 1267, 1269, 1271, 1273, 1275, 1277, 1279, 1281, 1283, 1285, 1287, 1289, 1291, 1293, 1295, 1295, 1297, 1301, 1303, and 1305, as shown in FIGS. 58A-58J.

[0385] In some embodiments, the NKG2D ABD has a set of vlCDRs selected from the vlCDR1, vlCDR2 and vlCDR3 sequences from a V_{L} selected from the group including: 1D7B4[NKG2D]_L1, 1D2B4[NKG2D]_L0, mAb-C[NKG2D]_L0, and mAb-D[NKG2D]_L0, as shown in FIGS. 23A and 23B. In some embodiments, the V_{L} domain of the NKG2D ABD is selected from the group including: 1D7B4[NKG2D]_L1, 1D2B4[NKG2D]_L0, mAb-C[NKG2D]_L0, mAb-D[NKG2D]_L0, and SEQ ID NOS:51, 2607 and 2615, as shown in FIGS. 23A and 23B.

[0386] Accordingly, included herein are NKG2D ABDs that have a set of 6 CDRs (vhCDR1, vhCDR2, vhCDR3, vlCDR1, vlCDR2 and vlCDR3) from V_{H}/V_{L} pairs selected from the group including: 1D7B4[NKG2D]_H1_L1, 1D2B4[NKG2D]_H0_L0, mAb-C[NKG2D]_H0_L0, mAb-D[NKG2D]_H0_L0, SEQ ID NOS:17-19, 23, 24, and 26; SEQ ID NOS:33-35, 23, 24, and 26; SEQ ID NOS:2604-2606 and 2608-2610; and SEQ ID NOS:2612-2614 and 2616-2618, as shown in FIGS. 23A and 23B. In many embodiments, the NKG2D ABDs have a set of 6 CDRs (vhCDR1, vhCDR2, vhCDR3, vlCDR1, vlCDR2 and vlCDR3) from V_{H}/V_{L} pairs selected from the group including: 1D7B4[NKG2D]_H1.1_L1; 1D7B4[NKG2D]_H1.2_L1; 1D7B4[NKG2D]_H1.3_L1; 1D7B4[NKG2D]_H1.4_L1; 1D7B4[NKG2D]_H1.5_L1; 1D7B4[NKG2D]_H1.6_L1; 1D7B4[NKG2D]_H1.7_L1; 1D7B4[NKG2D]_H1.8_L1; 1D7B4[NKG2D]_H1.9_L1; 1D7B4[NKG2D]_H1.10_L1; 1D7B4[NKG2D]_H1.11_L1; 1D7B4[NKG2D]_H1.12_L1; 1D7B4[NKG2D]_H1.13_L1; 1D7B4[NKG2D]_H1.14_L1; 1D7B4[NKG2D]_H1.1_L15; 1D7B4[NKG2D]_H1.16_L1; 1D7B4[NKG2D]_H1.17_L1; 1D7B4[NKG2D]_H1.18_L1; 1D7B4[NKG2D]_H1.19_L1; 1D7B4[NKG2D]_H1.20_L1; 1D7B4[NKG2D]_H1.21_L1; 1D7B4[NKG2D]_H1.22_L1; 1D7B4[NKG2D]_H1.23_L1; 1D7B4[NKG2D]_H1.24_L1; 1D7B4[NKG2D]_H1.25_L1; 1D7B4[NKG2D]_H1.26_L1; 1D7B4[NKG2D]_H1.27_L1; 1D7B4[NKG2D]_H1.28_L1; 1D7B4[NKG2D]_H1.29_L1; 1D7B4[NKG2D]_H1.30_L1; 1D7B4[NKG2D]_H1.31_L1; 1D7B4[NKG2D]_H1.32_L1; 1D7B4[NKG2D]_H1.33_L1; 1D7B4[NKG2D]_H1.34_L1; 1D7B4[NKG2D]_H1.35_L1; 1D7B4[NKG2D]_H1.36_L1; 1D7B4[NKG2D]_H1.37_L1; 1D7B4[NKG2D]_H1.38_L1; 1D7B4[NKG2D]_H1.39_L1; 1D7B4[NKG2D]_H1.40_L1; 1D7B4[NKG2D]_H1.41_L1; 1D7B4[NKG2D]_H1.42_L1; 1D7B4[NKG2D]_H1.43_L1; 1D7B4[NKG2D]_H1.44_L1; 1D7B4[NKG2D]_H1.45_L1; 1D7B4[NKG2D]_H1.46_L1; 1D7B4[NKG2D]_H1.47_L1; 1D7B4[NKG2D]_H1.48_L1; SEQ ID NOS:1212, 18, 19, 23, 24, and 26; SEQ ID NOS:1214, 18, 19, 23, 24, and 26; SEQ ID NOS:1216, 18, 19, 23, 24, and 26; SEQ ID NOS:1218, 18, 19, 23, 24, and 26; SEQ ID NOS:1220, 18, 19, 23, 24, and 26; SEQ ID NOS:1222, 18, 19, 23, 24, and 26; SEQ ID NOS:1224, 18, 19, 23, 24, and 26; SEQ ID NOS:1226, 18, 19, 23, 24, and 26; SEQ ID NOS:17, 18, 1230, 23, 24, and 26; SEQ ID NOS:17, 18, 1232, 23, 24, and 26; SEQ ID NOS:17, 18, 1234, 23, 24, and 26; SEQ ID NOS:17, 18, 1236, 23, 24, and 26; SEQ ID NOS:17, 18, 1238, 23, 24, and 26; SEQ ID NOS:17, 18, 1240, 23, 24, and 26; SEQ ID NOS:17, 18, 1242, 23, 24, and 26; SEQ ID NOS:17, 18, 1244, 23, 24, and 26; SEQ ID NOS: 17, 18, 1246, 23, 24, and 26; SEQ ID NOS:17, 18, 1248, 23, 24, and 26; SEQ ID NOS:17, 18, 1250, 23, 24, and 26; SEQ ID NOS:17, 18, 1252, 23, 24, and 26; SEQ ID NOS:17, 18, 1254, 23, 24, and 26; SEQ ID NOS:17, 18, 1256, 23, 24, and 26; SEQ ID NOS:17, 18, 1258, 23, 24, and 26; SEQ ID NOS:17, 18, 1260, 23, 24, and 26; SEQ ID NOS:17, 18, 1262, 23, 24, and 26; SEQ ID NOS:17, 18, 1264, 23, 24, and 26; SEQ ID NOS:17, 18, 1266, 23, 24, and 26; SEQ ID NOS: 17, 18, 1268, 23, 24, and 26; SEQ ID NOS:17, 18, 1270, 23, 24, and 26; SEQ ID NOS:17, 18, 1272, 23, 24, and 26; SEQ ID NOS:17, 18, 1274, 23, 24, and 26; SEQ ID NOS:17, 18, 1276, 23, 24, and 26; SEQ ID NOS:17, 18, 1278, 23, 24, and 26; SEQ ID NOS:17, 18, 1280, 23, 24, and 26; SEQ ID NOS:17, 18, 1282, 23, 24, and 26; SEQ ID NOS:17, 18, 1284, 23, 24, and 26; SEQ ID NOS:17, 18, 1286, 23, 24, and 26; SEQ ID NOS:17, 18, 1288, 23, 24, and 26; SEQ ID NOS: 17, 18, 1290, 23, 24, and 26; SEQ ID NOS:17, 18, 1292, 23, 24, and 26; SEQ ID NOS:17, 18, 1294, 23, 24, and 26; SEQ ID NOS:17, 18, 1296, 23, 24, and 26; SEQ ID NOS:17, 18, 1298, 23, 24, and 26; SEQ ID NOS:17, 18, 1300, 23, 24, and 26; SEQ ID NOS:17, 18, 1302, 23, 24, and 26; SEQ ID NOS:17, 18, 1304, 23, 24, and 26; SEQ ID NOS:17, 18, 1306, 23, 24, and 26, as shown in FIGS. 23A and 58A-58J.

[0387] Additionally, included herein are NKG2D ABDs that have V_{H}/V_{L} pairs selected from the group including: 1D7B4[NKG2D]_H1_L1, 1D2B4[NKG2D]_H0_L0, mAb-C[NKG2D]_H0_L0, mAb-D[NKG2D]_H0_L0, SEQ ID NOS:50 and 51, SEQ ID NOS:52 and 51, SEQ ID NOS:2603 and 2607, and SEQ ID NOS:2611 and 2615, as shown in FIGS. 23A and 23B. In some embodiments, the NKG2D ABDs have V_{H}/V_{L} pairs selected from the group including: 1D7B4[NKG2D]_H1.1_L1; 1D7B4[NKG2D]_H1.2_L1; 1D7B4[NKG2D]_H1.3_L1; 1D7B4[NKG2D]_H1.4_L1; 1D7B4[NKG2D]_H1.5_L1; 1D7B4[NKG2D]_H1.6_L1; 1D7B4[NKG2D]_H1.7_L1; 1D7B4[NKG2D]_H1.8_L1; 1D7B4[NKG2D]_H1.9_L1; 1D7B4[NKG2D]_H1.10_L1; 1D7B4[NKG2D]_H1.11_L1; 1D7B4[NKG2D]_H1.12_L1; 1D7B4[NKG2D]_H1.13_L1; 1D7B4[NKG2D]_H1.14_L1; 1D7B4[NKG2D]_H1.1_L15; 1D7B4[NKG2D]_H1.16_L1; 1D7B4[NKG2D]_H1.17_L1; 1D7B4[NKG2D]_H1.18_L1; 1D7B4[NKG2D]_H1.19_L1; 1D7B4[NKG2D]_H1.20_L1; 1D7B4[NKG2D]_H1.21_L1; 1D7B4[NKG2D]_H1.22_L1; 1D7B4[NKG2D]_H1.23_L1; 1D7B4[NKG2D]_H1.24_L1; 1D7B4[NKG2D]_H1.25_L1; 1D7B4[NKG2D]_H1.26_L1; 1D7B4[NKG2D]_H1.27_L1; 1D7B4[NKG2D]_H1.28_L1; 1D7B4[NKG2D]_H1.29_L1; 1D7B4[NKG2D]_H1.30_L1; 1D7B4[NKG2D]_H1.31_L1; 1D7B4[NKG2D]_H1.32_L1; 1D7B4[NKG2D]_H1.33_L1; 1D7B4[NKG2D]_H1.34_L1; 1D7B4[NKG2D]_H1.35_L1; 1D7B4[NKG2D]_H1.36_L1; 1D7B4[NKG2D]_H1.37_L1; 1D7B4[NKG2D]_H1.38_L1; 1D7B4[NKG2D]_H1.39_L1; 1D7B4[NKG2D]_H1.40_L1; 1D7B4[NKG2D]_H1.41_L1; 1D7B4[NKG2D]_H1.42_L1; 1D7B4[NKG2D]_H1.43_L1; 1D7B4[NKG2D]_H1.44_L1; 1D7B4[NKG2D]_H1.45_L1; 1D7B4[NKG2D]_H1.46_L1; 1D7B4[NKG2D]_H1.47_L1; 1D7B4[NKG2D]_H1.48_L1; SEQ ID NOS:1211 and 51; SEQ ID NOS:1213 and 51; SEQ ID NOS:1215 and 51; SEQ ID NOS:1217 and 51; SEQ ID NOS:1219 and 51; SEQ ID NOS:1221 and 51; SEQ ID NOS:1223 and 51; SEQ ID NOS:1225 and 51; SEQ ID NOS:1227 and 51; SEQ ID NOS:1229 and 51; SEQ ID NOS:1231 and 51; SEQ ID NOS:1233 and 51; SEQ ID NOS:1235 and 51; SEQ ID NOS:1237 and 51; SEQ ID NOS:1239 and 51; SEQ ID NOS:1241 and 51; SEQ ID NOS:1243 and 51; SEQ ID NOS:1245 and 51; SEQ ID NOS:1247 and 51; SEQ ID NOS:1249 and 51; SEQ ID NOS:1251 and 51; SEQ ID NOS:1253 and 51; SEQ ID NOS:1255 and 51; SEQ ID NOS:1257 and 51; SEQ ID NOS:1259 and 51; SEQ ID NOS:1261 and 51; SEQ ID NOS:1263 and 51; SEQ ID NOS:1265 and 51; SEQ ID NOS:1267 and 51; SEQ ID NOS:1269 and 51; SEQ ID NOS:1271 and 51; SEQ ID NOS:1273 and 51; SEQ ID NOS:1275 and 51; SEQ ID NOS:1277 and 51; SEQ ID NOS:1279 and 51; SEQ ID NOS:1281 and 51; SEQ ID NOS:1283 and 51; SEQ ID NOS:1285 and 51; SEQ ID NOS:1287 and 51; SEQ ID NOS:1289 and 51; SEQ ID NOS:1291 and 51; SEQ ID NOS:1293 and 51; SEQ ID NOS:1295 and 51; SEQ ID NOS:1297 and 51; SEQ ID NOS:1299 and 51; SEQ ID NOS:1301 and 51; SEQ ID NOS:1303 and 51; and SEQ ID NOS:1305 and 51, as shown in FIGS. 23A and 58A-58J.

[0388] In some embodiments, the V_{H}/V_{L} pairs of NKG2D scFvs are selected from the group including: 1D7B4_H1.3_L1, 1D7B4_H1.23_L1, 1D7B4_H1.28_L1, and 1D7B4_H1.31_L1. When the anti-NKG2D ABD is a scFv domain, the V_{H} and V_{L} domains can be in either orientation.

[0389] In some embodiments, the V_{H}/V_{L} pairs of NKG2D Fabs are selected from the group including: 1D7B4_H1.3_L1, 1D7B4_H1.23_L1, 1D7B4_H1.28_L1, and 1D7B4_H1.31_L1.

[0390] In some embodiments, the NKG2D ABDs have a V_{H}NL pair selected from the group including: SEQ ID NOS:940 and 3; SEQ ID NOS:941 and 3; SEQ ID NOS:942 and 3; SEQ ID NOS:943 and 3; SEQ ID NOS:944 and 3; SEQ ID NOS:945 and 3; SEQ ID NOS:946 and 3; SEQ ID NOS:947 and 3; SEQ ID NOS:948 and 3; SEQ ID NOS:949 and 3; SEQ ID NOS:950 and 3; SEQ ID NOS:951 and 3; SEQ ID NOS:952 and 3; SEQ ID NOS:953 and 3; SEQ ID NOS:954 and 3; SEQ ID NOS:955 and 3; SEQ ID NOS:956 and 3; SEQ ID NOS:957 and 3; SEQ ID NOS:958 and 3; SEQ ID NOS:959 and 3; SEQ ID NOS:960 and 3; SEQ ID NOS:961 and 3; SEQ ID NOS:962 and 3; SEQ ID NOS:963 and 3; SEQ ID NOS:964 and 3; SEQ ID NOS:965 and 3; SEQ ID NOS:966 and 3; SEQ ID NOS:967 and 3; SEQ ID NOS:968 and 3; SEQ ID NOS:969 and 3; SEQ ID NOS:970 and 3; SEQ ID NOS:971 and 3; SEQ ID NOS:972 and 3; SEQ ID NOS:973 and 3; SEQ ID NOS:974 and 3; SEQ ID NOS:975 and 3; SEQ ID NOS:976 and 3; SEQ ID NOS:977 and 3; SEQ ID NOS:978 and 3; SEQ ID NOS:979 and 3; SEQ ID NOS:980 and 3; SEQ ID NOS:981 and 3; SEQ ID NOS:982 and 3; SEQ ID NOS:983 and 3; SEQ ID NOS:984 and 3; SEQ ID NOS:985 and 3; SEQ ID NOS:986 and 3; SEQ ID NOS:987 and 3, as shown in FIGS. 54A-54L.

[0391] As will be appreciated by those in the art, suitable NKG2D antigen binding domains can comprise a set of 6 CDRs as depicted in the Figures, either as they are underlined or, in the case where a different numbering scheme is used as described herein and as shown in Table 2, as the CDRs that are identified using other alignments within the V_{H} and V_{L} sequences of those depicted in FIGS. 23A-23B and 58A-58J. Suitable ABDs can also include the entire V_{H} and V_{L} sequences as depicted in these sequences and Figures, used as scFvs or as Fabs. In many of the embodiments herein that contain an Fv to NKG2D, it is the Fab monomer that binds NKG2D.

[0392] In addition to the parental CDR sets disclosed in the figures and sequence listing that form an ABD to NKG2D, provided herein are variant NKG2D ABDs having CDRs that include at least one modification of the NKG2D ABD CDRs disclosed herein (e.g., FIGS. 23A-23B and 58A-58J and the sequence listing). In one embodiment, the NKG2D ABD of the subject heterodimeric antibody includes a set of 6 CDRs with 1, 2, 3, 4, 5, 6, 7, 8, 9, 10 amino acid modifications as compared to the 6 CDRs of an NKG2D binding domain V_{H}/V_{L} pair as described herein, including the figures and sequence listing. In exemplary embodiments, the NKG2D ABD of the subject heterodimeric antibody includes a set of 6 CDRs with 1, 2, 3, 4, 5, 6, 7, 8, 9, 10 amino acid modifications as compared to the 6 CDRs of one of the following NKG2D binding domain V_{H}/V_{L} pairs: 1D7B4_H1.3_L1, 1D7B4_H1.23_L1, 1D7B4_H1.28_L1, and 1D7B4_H1.31_L1. In certain embodiments, the NKG2D ABD of the subject antibody is capable of binding to NKG2D, as measured at least one of a Biacore, surface plasmon resonance (SPR), BLI (biolayer interferometry, e.g., Octet assay) assay, and/or flow cytometry, with the latter finding particular use in many embodiments. In particular embodiments, the NKG2D ABD is capable of binding human NKG2D (see, for example, FIG. 11). In some cases, each variant CDR has no more than 1 or 2 amino acid changes, with no more than 1 per CDR being particularly useful.

[0393] In some embodiments, the NKG2D ABD of the subject antibody includes 6 CDRs that are at least 90, 91, 92, 93, 94, 95, 96, 97, 98 or 99% identical to the 6 CDRs of an NKG2D ABD as described herein, including the figures and sequence listing. In exemplary embodiments, the NKG2D ABD of the subject antibody includes 6 CDRs that are at least 90, 91, 92, 93, 94, 95, 96, 97, 98 or 99% identical to the 6 CDRs of one of the following NKG2D binding domain V_{H}/V_{L} pairs: 1D7B4_H1.3_L1, 1D7B4_H1.23_L1, 1D7B4_H1.28_L1, and 1D7B4_H1.31_L1. In certain embodiments, the NKG2D ABD of the subject antibody is capable of binding to NKG2D, as measured at least one of a Biacore, surface plasmon resonance (SPR), BLI (biolayer interferometry, e.g., Octet assay) assay, and/or flow cytometry, with the latter finding particular use in many embodiments. In particular embodiments, the NKG2D ABD is capable of binding human NKG2D antigen (see, for example, FIG. 11).

[0394] In an exemplary embodiment, the NKG2D ABD of the subject antibody includes the variable heavy (V_{H}) domain and variable light (V_{L}) domain of any one of the NKG2D binding domain V_{H}/V_{L} pairs described herein, including the figures and sequence listing.

[0395] In some embodiments, the NKG2D ABD of the subject antibody includes a NKG2D antigen binding domain comprising a V_{H}/V_{L} pair present in the antibody molecules selected from the group including: SEQ ID NOS: 1320-1321, 1322-1323, 1324-1325-, 1326-1327, 1328-1329, 1330-1331, 1332-1333, 1334-1335, 1336-1337, 1338-1339, 1340-1341, 1342-1343, 1344-4345, 1346-1347, 1348-1349, 1350-1351, 1352-1353, 1354-1355, 1362-1363, 1364-1365, 1366-1367, 1368-1369, 1370-1371, 1372-1373, 1374-1375, 1376-1377, 1379-1379, 1380-1381, 1382-1383, 1384-1385, 1386-1387, 1388-1389, 1390-1391, 1392-1393, 1394-1395, 1396-1397, 1398-1399, 1400-1401, 1402-1403, 1404-1405, 1406-1407, 1408-1409, 1410-1411, 1412-1413, 1432-1433, 1434-1435, 1436-1437, 1438-1439, 1440-1441, 1442-1443, 1444-1445, 1446-1447, 1484-1485, 1495-1496, 1497-1498, 1499-1500, 1501-1502, 1503-1504, 1505-1506 and 1507-1508, 1896-1897, 1898-1899, 1900-1901, 1902-1903, 1904-1905, 1906-1907, 1908-1909, 1910-1911, 1912-1913, 1914-1915, 1916-1917, 1918-1919, 1920-1921, 1922-1923, 1924-1925, 1926-1927, 1928-1929, 1930-1931, 1932-1933, 1934-1935, 1936-1937, 1938-1939, 1940-1941, 1942-1943, 1944-1945, 1946-1947, 1948-1949, 1950-1951, 1952-1953, 1954-1955, 1956-1957, 1958-1959, 1960-1961, 1962-1963, 1964-1965, 1966-1967, 1968-1969, 1970-1971, 1972-1973, 1974-1975, 1976-1977, 1978-1979, 1980-1981, 1982-1983, 1984-1985, 1986-1987, 1988-1989, and 1990-1991, as presented in the Sequence Listing. In some embodiments, the NKG2D ABD of the subject antibody includes a NKG2D antigen binding domain comprising a V_{H}/V_{L} pair described herein, including in the figures and sequence list. Useful NKG2D ABDs are provided in the sequence listing including those recognized by those skilled in the art to bind the ECD of NKG2D.

[0396] In some embodiments, the NKG2D ABD is a variant of a parental NKG2D ABD such that the variant includes at least one amino acid substitution in the variable heavy domain. In some instances, the NKG2D ABD variant has detuned (e.g., modulated or changed such as reduced) affinity for the ECD of NKG2D compared to the parental NKG2D ABD. For instance, a detuned NKG2D ABD affords reduced fratricide while possessing potent binding activity.

[0397] Provided herein are consensus framework regions (FR) and complementarity determining regions (CDRs) (as in Kabat) for anti-NKG2D clone 1D7B4 detuned variable heavy domains and variable light domains (see, e.g., Table 3). In some embodiments, the NKG2D antigen binding domain provided herein includes one or more of the sequences depicted in Table 3.

TABLE 3

| | Amino acid | SEQ ID | |
|---|---|---|---|
| | sequence | NO: | |
| 1D7B4 | | | |
| VH | | | |
| HFR1 | EVQLLESGGGLVQPG | 1060 | |
| | GSLRLSCAASGFTFS | | |
| HCDR1 | SXX₂MS | | X₁ is selected |
| | | | from Y, I, A, |
| | | | S, H, Q; |
| | | | X₂ is selected |
| | | | from Y, N, A, H |
| HFR2 | WRQAPGKGLEWWS | 1061 | |
| HCDR2 | SISASGGSTYY | 1062 | |
| | ADSVKG | | |
| HFR3 | RFTISRDNSKNTLY | 1063 | |
| | LQMNSLRAEDTAVY | | |
| | YCAK | | |
| HCDR3 | GX₁FX₂X₃X₄X₅X₆Y | 1064 | X₁ is selected |
| | X₇DY | | from I, W, K, |
| | | | A, H |
| | | | X₂ is selected |
| | | | from S, A |
| | | | X₃ is selected |
| | | | from I, W, A, |
| | | | Q, E, H, S |
| | | | X₄ is selected |
| | | | from Y, H, A, |
| | | | S, E, Q, L |
| | | | X₅ is selected |
| | | | from F, H, A, |
| | | | S, E, Q, L |
| | | | X₆ is selected |
| | | | from F, H, E |
| | | | X₇ is selected |
| | | | from F, H |
| HFR4 | WGQGTLVTVSS | 1065 | |
| 1A7 VL | | | |
| LFR1 | DIQMTQSPSSLSAS | 1066 | |
| | VGDRVTITC | | |
| LCDR1 | RASQSISSYLN | 1067 | |
| LFR2 | WYQQKPGKAPKL | 1068 | |
| | LIY | | |
| LCDR2 | AASSLQS | 1069 | |
| LFR3 | GVPSRFSGSGSGT | 1070 | |
| | DFTLTISSLQPED | | |
| | FATYYC | | |
| LCDR3 | QQSYSTPYT | 1071 | |
| LFR4 | FGQGTKLEIK | 1072 | |

[0398] In some embodiments, the NKG2D antigen binding domain includes at least one of the HCDR1-3 and/or LCDR1-3 sequences of Table 3. In some embodiments, the NKG2D antigen binding domain includes at least one of the HFR1-4 and/or LFR1-4 sequences of Table 3.

(iii) B7H3 Antigen Binding Domains

[0399] In another aspect, provided herein are B7H3 ABDs and compositions that include such B7H3 ABDs including anti-NKG2D×anti-B7H3 antibodies. Such B7H3 binding domains and related antibodies find use, for example, in the treatment of B7H3 associated cancers. It is understood that the B7H3 ABDs described herein are capable of binding to the extracellular domain (ECD) of human B7H3.

[0400] Suitable B7H3 binding domains can comprise a set of 6 CDRs (i.e., vhCDR1-3 and vlCDR1-3) or V_{H} and V_{L} domains as depicted in the figures including in FIGS. 13 and 14 as well as the corresponding sequences in the sequence listing. The sequence listing also includes sequences of additional V_{H}/V_{L} pairs for binding B7H3, as recognized by those skilled in the art.

[0401] B7H3 antigen binding domain sequences that are of particular use include, but are not limited to, 38E2_H2_L1.1, 6A1_H1_L1, 2E4A3.189_H1_L1, 2E4A3.189_H1.22_L1, as depicted in FIGS. 13 and 14. When the anti-B7H3 ABD is a scFv domain, the V_{H} and V_{L} domains can be in either orientation.

[0402] As will be appreciated by those in the art, suitable B7H3 antigen binding domains can comprise a set of 6 CDRs as depicted in the Figures, either as they are underlined or, in the case where a different numbering scheme is used as described herein and as shown in Table 2, as the CDRs that are identified using other alignments within the V_{H} and V_{L} sequences of those depicted in FIGS. 13 and 14. Suitable ABDs can also include the entire V_{H} and V_{L} sequences as depicted in these sequences and Figures, used as scFvs or as Fabs. In many of the embodiments herein that contain an Fv to B7H3, it is the Fab monomer that binds B7H3.

[0403] In addition to the parental CDR sets disclosed in the figures and sequence listing that form an ABD to B7H3, provided herein are variant B7H3 ABDS having CDRs that include at least one modification of the B7H3 ABD CDRs disclosed herein (e.g., FIGS. 13 and 14 and the sequence listing). In one embodiment, the B7H3 ABD of the subject heterodimeric antibody (e.g., anti-B7H3×anti-NKG2D antibody) includes a set of 6 CDRs with 1, 2, 3, 4, 5, 6, 7, 8, 9, 10 amino acid modifications as compared to the 6 CDRs of a B7H3 ABD as described herein, including the figures and sequence listing. In exemplary embodiments, the B7H3 ABD of the subject heterodimeric antibody includes a set of 6 CDRs with 1, 2, 3, 4, 5, 6, 7, 8, 9, 10 amino acid modifications as compared to the 6 CDRs of one of the following CD3 binding domains: 38E2_H2_L1.1, 6A1_H1_L1, 2E4A3.189_H1_L1, 2E4A3.189_H1.22_L1, as depicted in FIGS. 13 and 14.

[0404] In certain embodiments, the B7H3 ABD of the subject antibody is capable of binding CD3 antigen, as measured by at least one of a Biacore, surface plasmon resonance (SPR), flow cytometry, and/or BLI (biolayer interferometry, e.g., Octet assay) assay, with the latter finding particular use in many embodiments. In particular embodiments, the B7H3 ABD is capable of binding human B7H3 antigen (see FIG. 12).

[0405] In some embodiments, the B7H3 ABD of the subject antibody includes 6 CDRs that are at least 90, 91, 92, 93, 94, 95, 96, 97, 98 or 99% identical to the 6 CDRs of a B7H3 ABD as described herein, including the figures and sequence listing. In exemplary embodiments, the B7H3 ABD of the subject antibody includes 6 CDRs that are at least 90, 91, 92, 93, 94, 95, 96, 97, 98 or 99% identical to the 6 CDRs of one of the following B7H3 binding domains: 38E2_H2_L1.1, 6A1_H1_L1, 2E4A3.189_H1_L1, 2E4A3.189_H1.22_L1, as depicted in FIGS. 13 and 14. In certain embodiments, the B7H3 ABD is capable of binding to the B7H3, as measured by at least one of a Biacore, surface plasmon resonance (SPR), flow cytometry, and/or BLI (biolayer interferometry, e.g., Octet assay) assay, with the latter finding particular use in many embodiments. In particular embodiments, the B7H3 ABD is capable of binding human B7H3 antigen (see FIG. 12).

[0406] In another exemplary embodiment, the B7H3 ABD of the subject antibody includes the variable heavy (V_{H}) domain and variable light (V_{L}) domain of any one of the B7H3 binding domains described herein, including the figures and sequence listing.

[0407] Additionally, included herein are B7H3 ABDs that have the variable heavy chain depicted in SEQ ID NO: 11 or SEQ ID NO: 13, and variable light chain depicted in SEQ ID NO: 12 or SEQ ID NO: 14 from U.S. Pat. No. 10,501,544, incorporated by reference in its entirety, with particularity for relevant disclosure pertaining to B7H3 ABDs and the accompanying sequences described therein. Further, included herein are B7H3 antigen binding domain with: a) the V_{H} CDRs depicted in SEQ ID NO: 1, SEQ ID NO: 25, and SEQ ID NO: 33 in combination with the V_{L} CDRs depicted in SEQ ID NO: 34, SEQ ID NO: 36, and SEQ ID NO: 6; or b) the V_{H} CDRs depicted in SEQ ID NO: 1, SEQ ID NO: 25, and SEQ ID NO: 10 in combination with the V_{L} CDRs depicted in SEQ ID NO: 38, SEQ ID NO: 30, and SEQ ID NO: 6; both from U.S. Pat. No. 9,963,509, incorporated by reference in its entirety, with particularity for relevant disclosure pertaining to B7H3 ABDs and the accompanying sequences described therein. Further, included herein are anti-B7H3 antigen binding domains with the V_{H} CDRs depicted in SEQ ID NO: 1, SEQ ID NO: 9, and SEQ ID NO: 10 in combination with the V_{L} CDRs depicted in SEQ ID NO: 11, SEQ ID NO: 312, and SEQ ID NO: 6; from U.S. Pat. No. 10,865,245, incorporated by reference in its entirety, with particularity for relevant disclosure pertaining to B7H3 ABDs and the accompanying sequences described therein. Still further, included herein are anti-B7H3 antigen binding domain with: a) vhCDR1 with the sequence depicted in SEQ ID NO: 110; b) vhCDR2 with the sequence depicted in SEQ ID NO: 111; c) vhCDR3 with the sequence depicted in SEQ ID NO: 113; d) vlCDR1 with the sequence depicted in SEQ ID NO: 114; e) vlCDR2 with the sequence depicted in SEQ ID NO: 115; and f) vlCDR3 with the sequence depicted in SEQ ID NO: 116, from WO2020/033702, incorporated by reference in its entirety, with particularity for relevant disclosure pertaining to B7H3 ABDs and the accompanying sequences described therein. Yet further, included herein is an anti-B7H3 antigen binding domain with: a) vhCDR1 with the sequence depicted in SEQ ID NO: 118; b) vhCDR2 with the sequence depicted in SEQ ID NO: 119; c) vhCDR3 with the sequence depicted in SEQ ID NO: 120; d) vlCDR1 with the sequence depicted in SEQ ID NO: 121; e) vlCDR2 with the sequence depicted in SEQ ID NO: 122; and f) vlCDR3 with the sequence depicted in SEQ ID NO: 123, from WO2020/033702, incorporated by reference in its entirety, with particularity for relevant disclosure pertaining to B7H3 ABDs and the accompanying sequences described therein. Still even further, included herein is an anti-B7H3 antigen binding domain with: a) vhCDR1 with the sequence depicted in SEQ ID NO: 371; b) vhCDR2 with the sequence depicted in SEQ ID NO: 372; c) vhCDR3 with the sequence depicted in SEQ ID NO: 373; d) vlCDR1 with the sequence depicted in SEQ ID NO: 374; e) vlCDR2 with the sequence depicted in SEQ ID NO: 375; and f) vlCDR3 with the sequence depicted in SEQ ID NO: 376, from WO2020/033702, incorporated by reference in its entirety, with particularity for relevant disclosure pertaining to B7H3 ABDs and the accompanying sequences described therein.

[0408] In some embodiments, the subject antibody includes a B7H3 ABD that includes a variable heavy domain and/or a variable light domain that are variants of another B7H3 ABD V_{H} and V_{L} domain disclosed herein. In one embodiment, the variant V_{H} domain and/or V_{L} domain has from 1, 2, 3, 4, 5, 6, 7, 8, 9 or 10 amino acid changes from a V_{H} and/or V_{L} domain of a B7H3 ABD described herein, including the figures and sequence listing. In exemplary embodiments, the variant V_{H} domain and/or V_{L} domain has from 1, 2, 3, 4, 5, 6, 7, 8, 9 or 10 amino acid changes from a V_{H} and/or V_{L} domain of one of the following B7H3 binding domains: 38E2_H2_L1.1, 6A1_H1_L1, 2E4A3.189_H1_L1, 2E4A3.189_H1.22_L1, as shown in FIGS. 13-14. In some embodiments, one or more amino acid changes are in the V_{H} and/or V_{L} framework regions (FR1, FR2, FR3, and/or FR4). In some embodiments, one or more amino acid changes are in one or more CDRs. In certain embodiments, the B7H3 ABD of the subject antibody is capable of binding to B7H3, as measured at least one of a Biacore, surface plasmon resonance (SPR), flow cytometry, and/or BLI (biolayer interferometry, e.g., Octet assay) assay, with the latter finding particular use in many embodiments. In particular embodiments, the B7H3 ABD is capable of binding human B7H3 antigen (see FIG. 12).

### (iv) Linkers

[0409] As shown herein, there are a number of suitable linkers (for use as either domain linkers or scFv linkers) that can be used to covalently attach the recited domains (e.g., scFvs, Fabs, Fc domains, etc.), including traditional peptide bonds, generated by recombinant techniques. Exemplary linkers to attach domains of the subject antibody to each other are depicted in FIG. 6. In some embodiments, the linker peptide may predominantly include the following amino acid residues: Gly, Ser, Ala, or Thr. The linker peptide should have a length that is adequate to link two molecules in such a way that they assume the correct conformation relative to one another so that they retain the desired activity. In one embodiment, the linker is from about 1 to 50 amino acids in length, preferably about 1 to 30 amino acids in length. In one embodiment, linkers of 1 to 20 amino acids in length may be used, with from about 5 to about 10 amino acids finding use in some embodiments. Useful linkers include glycine-serine polymers, including for example, (GS)n, (GSGGS)n (SEQ ID NO: 2619), (GGGGS)n (SEQ ID NO: 2620), and (GGGS)n (SEQ ID NO: 2621), where n is an integer of at least one (and generally from 3 to 4), glycine-alanine polymers, alanine-serine polymers, and other flexible linkers, some of which are shown in FIGS. 5 and 6. Alternatively, a variety of nonproteinaceous polymers, including but not limited to polyethylene glycol (PEG), polypropylene glycol, polyoxyalkylenes, or copolymers of polyethylene glycol and polypropylene glycol, may find use as linkers.

[0410] Other linker sequences may include any sequence of any length of C_{L}/CH1 domain but not all residues of C_{L}/CH1 domain; for example, the first 5-12 amino acid residues of the C_{L}/CH1 domains. Linkers can be derived from immunoglobulin light chain, for example Cκ or Cλ. Linkers can be derived from immunoglobulin heavy chains of any isotype, including for example Cγ1, Cγ2, Cγ3, Cγ4, Cα1, Cα2, Cδ, Cε, and Cμ. Linker sequences may also be derived from other proteins such as Ig-like proteins (e.g., TCR, FcR, KIR), hinge region-derived sequences, and other natural sequences from other proteins.

[0411] In some embodiments, the linker is a “domain linker”, used to link any two domains as outlined herein together. For example, in FIG. 15, there may be a domain linker that attaches the C-terminus of the CH1 domain of the Fab to the N-terminus of the scFv, with another optional domain linker attaching the C-terminus of the scFv to the CH2 domain (although in many embodiments the hinge is used as this domain linker). While any suitable linker can be used, many embodiments utilize a glycine-serine polymer as the domain linker, including for example, those in FIG. 6 as well as any peptide sequence that allows for recombinant attachment of the two domains with sufficient length and flexibility to allow each domain to retain its biological function. In some cases, and with attention being paid to “strandedness”, as outlined below, charged domain linkers, as used in some embodiments of scFv linkers can be used. Exemplary useful domain linkers are depicted in FIG. 6.

[0412] With particular reference to the domain linker used to attach the scFv domain to the Fc domain in the “2+1” format, there are several domain linkers that find particular use, including “full hinge C220S variant,” “flex half hinge,” “charged half hinge 1,” and “charged half hinge 2” as shown in FIG. 6.

[0413] In some embodiments, the linker is a “scFv linker”, used to covalently attach the V_{H} and V_{L} domains as discussed herein. In many cases, the scFv linker is a charged scFv linker, a number of which are shown in FIG. 5. Accordingly, in some embodiments, the antibodies described herein further provide charged scFv linkers, to facilitate the separation in pI between a first and a second monomer. That is, by incorporating a charged scFv linker, either positive or negative (or both, in the case of scaffolds that use scFvs on different monomers), this allows the monomer comprising the charged linker to alter the pI without making further changes in the Fc domains. These charged linkers can be substituted into any scFv containing standard linkers. Again, as will be appreciated by those in the art, charged scFv linkers are used on the correct “strand” or monomer, according to the desired changes in pI. For example, as discussed herein, to make 1+1 Fab-scFv-Fc format heterodimeric antibody, the original pI of the Fv region for each of the desired antigen binding domains are calculated, and one is chosen to make an scFv, and depending on the pI, either positive or negative linkers are chosen.

[0414] Charged domain linkers can also be used to increase the pI separation of the monomers of the antibodies described herein as well, and thus those included in FIG. 5 can be used in any embodiment herein where a linker is utilized.

### VI. Useful Formats of the Invention

[0415] As will be appreciated by those in the art and discussed more fully below, the heterodimeric bispecific antibodies provided herein can take on a wide variety of configurations, as are generally depicted in FIG. 15. The heterodimeric formats of the antibodies described herein can have different valences as well as be bispecific. That is, heterodimeric antibodies of the antibodies described herein can be bivalent and bispecific, wherein one target NK cell antigen (e.g., NKG2D) is bound by one binding domain and the one target tumor antigen (e.g., B7H3) is bound by a second binding domain. In some embodiments, heterodimeric antibodies described herein can be bivalent and bispecific, wherein one target tumor antigen is bound by one binding domain and another target tumor antigen is bound by a second binding domain. The heterodimeric antibodies can also be trivalent and bispecific, wherein the first antigen is bound by two binding domains and the second antigen by a second binding domain. As is outlined herein, when NKG2D is one of the target antigens, in some embodiments, the NKG2D is bound only monovalently, to reduce potential side effects.

[0416] The antibodies described herein utilize anti-NKG2D antigen binding domains in combination with anti-B7H3 binding domains. As will be appreciated by those in the art, any collection of anti-NKG2D CDRs, anti-NKG2D variable light and variable heavy domains, Fabs and scFvs as described herein, and depicted in any of the Figures can be used. Similarly, any of the anti-B7H3 antigen binding domains can be used, whether CDRs, variable light and variable heavy domains, Fabs and scFvs as described herein, and depicted in any of the Figures can be used, optionally and independently combined in any combination.

[0417] 1. 1+1 Fab-scFv-Fc Format

[0418] One heterodimeric scaffold that finds particular use in the antibodies described herein is the “1+1 Fab-scFv-Fc” or “bottle-opener” format as shown in FIG. 15A with an exemplary combination of an NKG2 antigen binding domain and a B7H3 antigen binding domain. In this embodiment, one heavy chain monomer of the antibody contains a single chain Fv (“scFv”, as defined below) and an Fc domain. The scFv includes a variable heavy domain (VH1) and a variable light domain (VL1), wherein the VH1 is attached to the VL1 using an scFv linker that can be charged (see, e.g., FIG. 5). The scFv is attached to the heavy chain using a domain linker (see, e.g., FIG. 6). The other heavy chain monomer is a “regular” heavy chain (VH-CH1-hinge-CH2-CH3). The 1+1 Fab-scFv-Fc also includes a light chain that interacts with the V_{H}-CH1 to form a Fab. This structure is sometimes referred to herein as the “bottle-opener” format, due to a rough visual similarity to a bottle-opener. The two heavy chain monomers are brought together by the use of amino acid variants (e.g., heterodimerization variants, discussed above) in the constant regions (e.g., the Fc domain, the CH1 domain and/or the hinge region) that promote the formation of heterodimeric antibodies as is described more fully below.

[0419] There are several distinct advantages to the present “1+1 Fab-scFv-Fc” format. As is known in the art, antibody analogs relying on two scFv constructs often have stability and aggregation problems, which can be alleviated in the antibodies described herein by the addition of a “regular” heavy and light chain pairing. In addition, as opposed to formats that rely on two heavy chains and two light chains, there is no issue with the incorrect pairing of heavy and light chains (e.g., heavy 1 pairing with light 2, etc.).

[0420] Many of the embodiments outlined herein rely in general on the 1+1 Fab-scFv-Fc or “bottle opener” format antibody that comprises a first monomer comprising an scFv, comprising a variable heavy and a variable light domain, covalently attached using an scFv linker (charged, in many but not all instances), where the scFv is covalently attached to the N-terminus of a first Fc domain usually through a domain linker The domain linker can be either charged or uncharged and exogenous or endogenous (e.g., all or part of the native hinge domain). Any suitable linker can be used to attach the scFv to the N-terminus of the first Fc domain. In some embodiments, the domain linker is chosen from the domain linkers in FIG. 6. The second monomer of the 1+1 Fab-scFv-Fc format or “bottle opener” format is a heavy chain, and the composition further comprises a light chain.

[0421] In some embodiments, the scFv is the domain that binds to NKG2D, and the Fab forms a B7H3 binding domain. In other embodiments, the scFv is the domain that binds B7H3, and the Fab forms a NKG2D binding domain. An exemplary anti-B7H3×anti-NKG2D bispecific antibody in the 1+1 Fab-scFv-Fc format is depicted in FIGS. 19 and 59.

[0422] In some embodiments, one or both Fc domains of this format can include one or more of: (i) FcγRIIIa variants, (ii) pI variants, (iii) skew variants, and (iv) FcRn variants, as well as any combination thereof, as desired and described herein. In certain embodiments, the Fc domains of the 1+1 Fab-scFv-Fc format contain FcγRIIIa variants, skew variants, pI variants, and optionally FcRn variants. In many embodiments, the Fc domains of the 1+1 Fab-scFv-Fc format contain FcγRIIIa variants, skew variants, pI variants, and FcRn variants. In some embodiments, such Fc domains include asymmetric FcγRIIIa variants such that one Fc domain includes S239D/I332E substitutions, and the other Fc domain includes no FcγRIIIa variants, amino acid substitution(s) selected from the group including S239D, I332E, S239D/I332E, G236A, S239E, I332D, G236A/I332E, S239D/I332E/A330L, I332E/A330L, F243L, S298A, E333A, K334A, S298A/E333A, and S298A/E333A/K334A. In many embodiments, the Fc domains generally include skew variants (e.g., a set of amino acid substitutions as shown in FIG. 1, with particularly useful skew variants being selected from the group including: S364K/E357Q:L368D/K370S; L368D/K370S:S364K; L368E/K370S:S364K; T411E/K360E/Q362E:D401K; L368D/K370S:S364K/E357L; K370S:S364K/E357Q; T366S/L368A/Y407V:T366W and T366S/L368A/Y407V/Y349C:T366W/S354C), and optionally FcRn variants (including M428L/N434S, M428L/N434A or M252Y/S254T/T256E), optionally charged scFv linkers (including those shown in FIG. 5), optionally ablation variants (including those shown in FIG. 3), and the heavy chain comprises pI variants (including those shown in FIG. 2).

[0423] In certain embodiments, the 1+1 Fab-scFv-Fc scaffold format includes a first monomer that includes a scFv-domain linker-CH2-CH3 monomer, a second monomer that includes a first variable heavy domain-CH1-hinge-CH2-CH3 monomer and a third monomer that includes a first variable light domain. In some embodiments, the CH2-CH3 of the first monomer is a first variant Fc domain and the CH2-CH3 of the second monomer is a second variant Fc domain. In some embodiments, the scFv includes a scFv variable heavy domain and a scFv variable light domain that form an NKG2D antigen binding domain. In certain embodiments, the scFv variable heavy domain and scFv variable light domain are covalently attached using an scFv linker (charged, in many but not all instances. See, e.g., FIG. 5). In some embodiments, the first variable heavy domain and first variable light domain form a B7H3 binding domain. In certain embodiments, the scFv includes a scFv variable heavy domain and a scFv variable light domain that form a B7H3 antigen binding domain. In certain embodiments, the scFv variable heavy domain and scFv variable light domain are covalently attached using an scFv linker (charged, in many but not all instances. See, e.g., FIG. 5). In some embodiments, the first variable heavy domain and first variable light domain form an NKG2D antigen binding domain.

[0424] Some embodiments include 1+1 Fab-scFv-Fc formats that comprise: a) a first monomer (the “scFv monomer”) that comprises a charged scFv linker (with the +H sequence of FIG. 5 being preferred in some embodiments), the skew variants S364K/E357Q, and an scFv that binds to NKG2D as outlined herein; b) a second monomer (the “Fab monomer”) that comprises the skew variants L368D/K370S, the pI variants N208D/Q295E/N384D/Q418E/N421D, and a variable heavy domain; and c) a light chain that includes a variable light domain light domain (V_{L}) and a constant light domain (C_{L}), wherein numbering is according to EU numbering. The variable heavy domain and variable light domain form a B7H3 antigen binding domain. In some embodiments, the scFv monomer further includes the v90 variants S239D/I332E. In other embodiments, the Fab monomer further includes the v90 variants S239D/I332E. In some embodiments, the scFv and Fab monomers both further include the M428L/N434S, M428L/N434A or M252Y/S254T/T256E variants.

[0425] FIGS. 7-9, 35, 50-53 and 60 show some exemplary Fc domain sequences or variants thereof that are useful in the 1+1 Fab-scFv-Fc format antibodies. The “monomer 1” sequences depicted in such figures typically refer to the Fc domain of the “Fab-Fc heavy chain” and the “monomer 2” sequences refer to the Fc domain of the “scFv-Fc heavy chain.” FIG. 4 depicts exemplary Fc variants that can be present in Fc domains of 1+1 Fab-scFv-Fc format antibodies. Further, FIG. 10 provides useful C_{L} sequences that can be used with this format.

[0426] Any suitable NKG2D ABD can be included in the 1+1 Fab-scFv-Fc format antibody, included those provided herein. NKG2D antigen binding domain sequences that are of particular use in these embodiments include, but are not limited to, V_{H} and V_{L} domains selected from have V_{H}/V_{L} pairs selected from the group including: 1D7B4_H1_L1; 1D2B4_H0_L0; mAb-C_H0_L0; mAb-D_H0_L0; 1D7B4_L1_H1; 1D2B4_L0_H0; mAb-C_L0_H0; mAb-D_L0_H0; 1D7B4_H1.1_L1; 1D7B4_H1.2_L1; 1D7B4_H1.3_L1; 1D7B4_H1.4_L1; 1D7B4_H1.5_L1; 1D7B4_H1.6_L1; 1D7B4_H1.7_L1; 1D7B4_H1.8_L1; 1D7B4_H1.9_L1; 1D7B4_H1.10_L1; 1D7B4_H1.11_L1; 1D7B4_H1.12_L1; 1D7B4_H1.13_L1; 1D7B4_H1.14_L1; 1D7B4_H1.15_L1; 1D7B4_H1.16_L1; 1D7B4_H1.17_L1; 1D7B4_H1.18_L1; 1D7B4_H1.19_L1; 1D7B4_H1.20_L1; 1D7B4_H1.21_L1; 1D7B4_H1.22_L1; 1D7B4_H1.23_L1; 1D7B4_H1.24_L1; 1D7B4_H1.25_L1; 1D7B4_H1.26_L1; 1D7B4_H1.27_L1; 1D7B4_H1.28_L1; 1D7B4_H1.29_L1; 1D7B4_H1.30_L1; 1D7B4_H1.31_L1; 1D7B4_H1.32_L1; 1D7B4_H1.3_L13; 1D7B4_H1.34_L1; 1D7B4_H1.35_L1; 1D7B4_H1.36_L1; 1D7B4_H1.37_L1; 1D7B4_H1.38_L1; 1D7B4_H1.39_L1; 1D7B4_H1.40_L1; 1D7B4_H1.41_L1; 1D7B4_H1.42_L1; 1D7B4_H1.43_L1; 1D7B4_H1.44_L1; 1D7B4_H1.45_L1; 1D7B4_H1.46_L1; 1D7B4_H1.47_L1; 1D7B4_H1.48_L1; 1D7B4_L1_H1.1; 1D7B4_L1_H1.2; 1D7B4_L1_H1.3; 1D7B4_L1_H1.4; 1D7B4_L1_H1.5; 1D7B4_L1_H1.6; 1D7B4_L1_H1.7; 1D7B4_L1_H1.8; 1D7B4_L1_H1.9; 1D7B4_L1_H1.10; 1D7B4_L1_H1.11; 1D7B4_L1_H1.12; 1D7B4_L1_H1.13; 1D7B4_L1_H1.14; 1D7B4_L1_H1.15; 1D7B4_L1_H1.16; 1D7B4_L1_H1.17; 1D7B4_L1_H1.18; 1D7B4_L1_H1.19; 1D7B4_L1_H1.20; 1D7B4_L1_H1.21; 1D7B4_L1_H1.22; 1D7B4_L1_H1.23; 1D7B4_L1_H1.24; 1D7B4_L1_H1.25; 1D7B4_L1_H1.26; 1D7B4_L1_H1.27; 1D7B4_L1_H1.28; 1D7B4_L1_H1.29; 1D7B4_L1_H1.30; 1D7B4_L1_H1.31; 1D7B4_L1_H1.32; 1D7B4_L1_H1.33; 1D7B4_L1_H1.34; 1D7B4_L1_H1.35; 1D7B4_L1_H1.36; 1D7B4_L1_H1.37; 1D7B4_L1_H1.38; 1D7B4_L1_H1.39; 1D7B4_L1_H1.40; 1D7B4_L1_H1.41; 1D7B4_L1_H1.42; 1D7B4_L1_H1.43; 1D7B4_L1_H1.44; 1D7B4_L1_H1.45; 1D7B4_L1_H1.46; 1D7B4_L1_H1.47; 1D7B4_L1_H1.48; 1D2B4_H1_L1; 1D2B4_L1_H1; ADI27744_A44_H0_L0; ADI27744_A44_L0_H0; ADI27749_A49_H0_L0; ADI27749_A49_L0_H0; or variants thereof, as well as those depicted in FIGS. 19, 56, 58 and 59.

[0427] In some embodiments, the αNKG2D ABD V_{H}/V_{L} pairs are found in, for example, SEQ ID NOS:1020 and 3; SEQ ID NOS:1022 and 3; SEQ ID NOS:1023 and 1024; SEQ ID NOS:1025 and 1026; SEQ ID NOS:1211 and 51; SEQ ID NOS:1213 and 51; SEQ ID NOS:1215 and 51; SEQ ID NOS:1217 and 51; SEQ ID NOS:1219 and 51; SEQ ID NOS:1221 and 51; SEQ ID NOS:1223 and 51; SEQ ID NOS:1225 and 51; SEQ ID NOS:1227 and 51; SEQ ID NOS:1229 and 51; SEQ ID NOS:1231 and 51; SEQ ID NOS:1233 and 51; SEQ ID NOS:1235 and 51; SEQ ID NOS:1237 and 51; SEQ ID NOS:1239 and 51; SEQ ID NOS:1241 and 51; SEQ ID NOS:1243 and 51; SEQ ID NOS:1245 and 51; SEQ ID NOS:1247 and 51; SEQ ID NOS:1249 and 51; SEQ ID NOS:1251 and 51; SEQ ID NOS:1253 and 51; SEQ ID NOS:1255 and 51; SEQ ID NOS:1257 and 51; SEQ ID NOS:1259 and 51; SEQ ID NOS:1261 and 51; SEQ ID NOS:1263 and 51; SEQ ID NOS:1265 and 51; SEQ ID NOS:1267 and 51; SEQ ID NOS:1269 and 51; SEQ ID NOS:1271 and 51; SEQ ID NOS:1273 and 51; SEQ ID NOS:1275 and 51; SEQ ID NOS:1277 and 51; SEQ ID NOS:1279 and 51; SEQ ID NOS:1281 and 51; SEQ ID NOS:1283 and 51; SEQ ID NOS:1285 and 51; SEQ ID NOS:1287 and 51; SEQ ID NOS:1289 and 51; SEQ ID NOS:1291 and 51; SEQ ID NOS:1293 and 51; SEQ ID NOS:1295 and 51; SEQ ID NOS:1297 and 51; SEQ ID NOS:1299 and 51; SEQ ID NOS:1301 and 51; SEQ ID NOS:1303 and 51; and SEQ ID NOS:1305 and 51, or variants thereof, as well as those depicted in the FIGS. 56 and 58.

[0428] NKG2D antigen binding domain sequences or NKG2D ABD V_{H}/V_{L} pairs finding particular use in these embodiments include, but are not limited to, 1D2B4_H1_L1; 1D2B4_L1_H1; ADI27744_A44_H0_L0; ADI27744_A44_L0_H0; ADI27749_A49_H0_L0; ADI27749_A49_L0_H0; 1D7B4_H1_L1; 1D7B4_L1_H1; 1D7B4_H1.3_L1; 1D7B4_L1_H1.3; 1D7B4_H1.23_L1; 1D7B4_L1_H1.23; 1D7B4_H1.28_L1; 1D7B4_L1_H1.28; 1D7B4_H1.31_L1; 1D7B4_L1_H1.31; 1D7B4_H1.33_L1; 1D7B4_L1_H1.33, or a variant thereof. In certain embodiments, the αNKG2D ABD V_{H}/V_{L} pairs are selected from the group including: ADI27744_A44_H0_L0; ADI27749_A44_H0_L0; 1D7B4_H1.3_L1; 1D7B4_H1.23_L1; 1D7B4_H1.28_L1; 1D7B4_H1.31_L1; 1D7B4_H1.33_L1, as well as V_{H}/V_{L} sequence pairs provided in SEQ ID NOS:1308, 1310, 1312, 1314 and 1316. In particular embodiments, the NKG2D scFv is any one selected from the group including those in SEQ ID NOS:1308, 1310, 1312, 1314 and 1316.

[0429] Any suitable B7H3 ABD can be included in the 1+1 Fab-scFv-Fc format antibody, including those provided herein. B7H3 ABDs that are of particular use in these embodiments include, but are not limited to, V_{H} and V_{L} domains selected from have V_{H}/V_{L} pairs selected from the group including: 38E2_H2_L1.1; 38E2_L1.1_H2; 6A1_H1_L1; 6A1_L1_H1; 2E4A3.189_H1_L1; 2E4A3.189_L1_H1; 2E4A3.189_H1.22_L1; 2E4A3.189_L1_H1.22, or a variant thereof, as well as those depicted in FIGS. 13 and 14. In certain embodiments, the αB7H3 ABD V_{H}/V_{L} pairs are selected from the group including: 2E4A3.189_H1.22_L1; 38E2_H2_L1.1, 6A1_H1_L1; SEQ ID NOS:140 and 141; SEQ ID NOS:242 and 246; SEQ ID NOS:145 and 51; or variants thereof, as well as those depicted in the FIGS. 13 and 14.

[0430] Exemplary 1+1 Fab-scFv format antibodies are depicted in FIG. 56, such as XENP40106, XENP40372, XENP40375, XENP40376, XENP40377, XENP40381, XENP40457, XENP41333, XENP41334, XENP41335, XENP41336, XENP42658, XENP42659, XENP42660, XENP42661, XENP42662, XENP43715, XENP43722, and XENP43994, as well as in the sequence listing.

[0431] 2. 2+1 Fab₂-scFv-Fc Format

[0432] One heterodimeric scaffold that finds particular use in the antibodies described herein is the “2+1 Fab₂-scFv-Fc” format (also referred to in previous related filings as “central-scFv format”) shown in FIG. 15B with an exemplary combination of an NKG2D binding domain and two tumor target antigen (B7H3) binding domains. In this embodiment, the format relies on the use of an inserted scFv domain thus forming a third antigen binding domain, wherein the Fab portions of the two monomers bind B7H3 and the “extra” scFv domain binds NKG2D. The scFv domain is inserted between the Fc domain and the CH1-Fv region of one of the monomers, thus providing a third antigen binding domain. As described, B7H3×NKG2D bispecific antibodies having the 2+1 Fab₂-scFv-Fc format are potent in inducing redirected T cell cytotoxicity in cellular environments that express low levels of B7H3. Moreover, as shown in the examples, B7H3×NKG2D bispecific antibodies having the 2+1 Fab₂-scFv-Fc format allow for the “fine tuning” of immune responses as such antibodies exhibit a wide variety of different properties, depending on the B7H3 and/or NKG2D binding domains used. For example, such antibodies exhibit differences in selectivity for cells with different B7H3 expression, potencies for B7H3 expressing cells, ability to elicit cytokine release, and sensitivity to soluble B7H3. These B7H3 antibodies find use, for example, in the treatment of B7H3-associated cancers.

[0433] In this embodiment, one monomer comprises a first heavy chain comprising a first variable heavy domain, a CH1 domain (and optional hinge) and Fc domain, with a scFv comprising a scFv variable light domain, an scFv linker and a scFv variable heavy domain. The scFv is covalently attached between the C-terminus of the CH1 domain of the heavy constant domain and the N-terminus of the first Fc domain using optional domain linkers (VH1-CH1-[optional linker]-VH2-scFv linker-VL2-[optional linker]-CH2-CH3, or the opposite orientation for the scFv, VH1-CH1-[optional linker]-VL2-scFv linker-VH2-[optional linker]-CH2-CH3). The optional linkers can be any suitable peptide linkers, including, for example, the domain linkers included in FIG. 6. In some embodiments, the optional linker is a hinge or a fragment thereof. The other monomer is a standard Fab side (i.e., VH1-CH1-hinge-CH2-CH3). This embodiment further utilizes a common light chain comprising a variable light domain and a constant light domain, that associates with the heavy chains to form two identical Fabs that bind B7H3.

[0434] In some embodiments, one or both Fc domains of these constructs can include one or more of: (i) FcγRIIIa variants, (ii) pI variants, (iii) skew variants, and (iv) FcRn variants, as well as any combination thereof, as desired and described herein. In certain embodiments, the Fc domains of the 2+1 Fab₂-scFv-Fc format contain FcγRIIIa variants, skew variants, pI variants, and optionally FcRn variants. In some embodiments, such Fc domains include asymmetric FcγRIIIa variants such that one Fc domain includes S239D/I332E substitutions, and the other Fc domain includes no FcγRIIIa variants, amino acid substitution(s) selected from the group including S239D, I332E, S239D/I332E, G236A, S239E, I332D, G236A/I332E, S239D/I332E/A330L, I332E/A330L, F243L, S298A, E333A, K334A, S298A/E333A, and S298A/E333A/K334A. In many embodiments, the Fc domains generally include skew variants (e.g., a set of amino acid substitutions as shown in FIG. 1, with particularly useful skew variants being selected from the group including: S364K/E357Q:L368D/K370S; L368D/K370S:S364K; L368E/K370S:S364K; T411E/K360E/Q362E:D401K; L368D/K370S:S364K/E357L; K370S:S364K/E357Q; T366S/L368A/Y407V:T366W and T366S/L368A/Y407V/Y349C:T366W/S354C), and optionally FcRn variants (including M428L/N434S, M428L/N434A or M252Y/S254T/T256E), optionally charged scFv linkers (including those shown in FIG. 5), optionally ablation variants (including those shown in FIG. 3), and the heavy chain comprises pI variants (including those shown in FIG. 2).

[0435] FIG. 52 shows some exemplary Fc domain sequences that are useful with the 2+1 Fab₂-scFv-Fc format. The “monomer 1” sequences typically refer to the Fc domain of the “Fab-Fc heavy chain” and the “monomer 2” sequences refer to the Fc domain of the “Fab-scFv-Fc heavy chain” as shown in FIG. 52. Other useful Fc domain sequences or variants thereof can be found in FIGS. 7-9, 35, 50-53, and 60. In some embodiments, the Fc domain pairs include the monomer 1 and monomer 2 sequences set forth in SEQ ID NOS:815-816, 817-818, 819-820, 821-822, 823-824, 825-826, 827-828, 829-830, 821-832, 833-834, 835-836, 837-838, 839-840, 841-842. 843-844, 845-846, 847-848, 849-850, 851-852, 853-854, 855-856, 857-858, 859-860, 861-862, 863-864, 865-866, 867-868, 869-870, 871-872, or 873-874. Further, FIG. 9 provides useful C_{L} sequences that can be used with this format.

[0436] Any suitable NKG2D ABD can be included in the 2+1 Fab₂-scFv-Fc format antibody, included those provided herein. NKG2D antigen binding domain sequences that are of particular use in these embodiments include, but are not limited to, V_{H} and V_{L} domains selected from have V_{H}/V_{L} pairs selected from the group including: 1D7B4_H1_L1; 1D2B4_H0_L0; mAb-C_H0_L0; mAb-D_H0_L0; 1D7B4_L1_H1; 1D2B4_L0_H0; mAb-C_L0_H0; mAb-D_L0_H0; 1D7B4_H1.1_L1; 1D7B4_H1.2_L1; 1D7B4_H1.3_L1; 1D7B4_H1.4_L1; 1D7B4_H1.5_L1; 1D7B4_H1.6_L1; 1D7B4_H1.7_L1; 1D7B4_H1.8_L1; 1D7B4_H1.9_L1; 1D7B4_H1.10_L1; 1D7B4_H1.11_L1; 1D7B4_H1.12_L1; 1D7B4_H1.13_L1; 1D7B4_H1.14_L1; 1D7B4_H1.15_L1; 1D7B4_H1.16_L1; 1D7B4_H1.17_L1; 1D7B4_H1.18_L1; 1D7B4_H1.19_L1; 1D7B4_H1.20_L1; 1D7B4_H1.21_L1; 1D7B4_H1.22_L1; 1D7B4_H1.23_L1; 1D7B4_H1.24_L1; 1D7B4_H1.25_L1; 1D7B4_H1.26_L1; 1D7B4_H1.27_L1; 1D7B4_H1.28_L1; 1D7B4_H1.29_L1; 1D7B4_H1.30_L1; 1D7B4_H1.31_L1; 1D7B4_H1.32_L1; 1D7B4_H1.3_L13; 1D7B4_H1.34_L1; 1D7B4_H1.35_L1; 1D7B4_H1.36_L1; 1D7B4_H1.37_L1; 1D7B4_H1.38_L1; 1D7B4_H1.39_L1; 1D7B4_H1.40_L1; 1D7B4_H1.41_L1; 1D7B4_H1.42_L1; 1D7B4_H1.43_L1; 1D7B4_H1.44_L1; 1D7B4_H1.45_L1; 1D7B4_H1.46_L1; 1D7B4_H1.47_L1; 1D7B4_H1.48_L1; 1D7B4_L1_H1.1; 1D7B4_L1_H1.2; 1D7B4_L1_H1.3; 1D7B4_L1_H1.4; 1D7B4_L1_H1.5; 1D7B4_L1_H1.6; 1D7B4_L1_H1.7; 1D7B4_L1_H1.8; 1D7B4_L1_H1.9; 1D7B4_L1_H1.10; 1D7B4_L1_H1.11; 1D7B4_L1_H1.12; 1D7B4_L1_H1.13; 1D7B4_L1_H1.14; 1D7B4_L1_H1.15; 1D7B4_L1_H1.16; 1D7B4_L1_H1.17; 1D7B4_L1_H1.18; 1D7B4_L1_H1.19; 1D7B4_L1_H1.20; 1D7B4_L1_H1.21; 1D7B4_L1_H1.22; 1D7B4_L1_H1.23; 1D7B4_L1_H1.24; 1D7B4_L1_H1.25; 1D7B4_L1_H1.26; 1D7B4_L1_H1.27; 1D7B4_L1_H1.28; 1D7B4_L1_H1.29; 1D7B4_L1_H1.30; 1D7B4_L1_H1.31; 1D7B4_L1_H1.32; 1D7B4_L1_H1.33; 1D7B4_L1_H1.34; 1D7B4_L1_H1.35; 1D7B4_L1_H1.36; 1D7B4_L1_H1.37; 1D7B4_L1_H1.38; 1D7B4_L1_H1.39; 1D7B4_L1_H1.40; 1D7B4_L1_H1.41; 1D7B4_L1_H1.42; 1D7B4_L1_H1.43; 1D7B4_L1_H1.44; 1D7B4_L1_H1.45; 1D7B4_L1_H1.46; 1D7B4_L1_H1.47; 1D7B4_L1_H1.48; 1D2B4_H1_L1; 1D2B4_L1_H1; ADI27744_A44_H0_L0; ADI27744_A44_L0_H0; ADI27749_A49_H0_L0; ADI27749_A49_L0_H0; or variants thereof, as well as those depicted in FIGS. 19, 56, 58 and 59.

[0437] In some embodiments, the αNKG2D ABD V_{H}/V_{L} pairs are found in, for example, SEQ ID NOS:1020 and 3; SEQ ID NOS:1022 and 3; SEQ ID NOS:1023 and 1024; SEQ ID NOS:1025 and 1026; SEQ ID NOS:1211 and 51; SEQ ID NOS:1213 and 51; SEQ ID NOS:1215 and 51; SEQ ID NOS:1217 and 51; SEQ ID NOS:1219 and 51; SEQ ID NOS:1221 and 51; SEQ ID NOS:1223 and 51; SEQ ID NOS:1225 and 51; SEQ ID NOS:1227 and 51; SEQ ID NOS:1229 and 51; SEQ ID NOS:1231 and 51; SEQ ID NOS:1233 and 51; SEQ ID NOS:1235 and 51; SEQ ID NOS:1237 and 51; SEQ ID NOS:1239 and 51; SEQ ID NOS:1241 and 51; SEQ ID NOS:1243 and 51; SEQ ID NOS:1245 and 51; SEQ ID NOS:1247 and 51; SEQ ID NOS:1249 and 51; SEQ ID NOS:1251 and 51; SEQ ID NOS:1253 and 51; SEQ ID NOS:1255 and 51; SEQ ID NOS:1257 and 51; SEQ ID NOS:1259 and 51; SEQ ID NOS:1261 and 51; SEQ ID NOS:1263 and 51; SEQ ID NOS:1265 and 51; SEQ ID NOS:1267 and 51; SEQ ID NOS:1269 and 51; SEQ ID NOS:1271 and 51; SEQ ID NOS:1273 and 51; SEQ ID NOS:1275 and 51; SEQ ID NOS:1277 and 51; SEQ ID NOS:1279 and 51; SEQ ID NOS:1281 and 51; SEQ ID NOS:1283 and 51; SEQ ID NOS:1285 and 51; SEQ ID NOS:1287 and 51; SEQ ID NOS:1289 and 51; SEQ ID NOS:1291 and 51; SEQ ID NOS:1293 and 51; SEQ ID NOS:1295 and 51; SEQ ID NOS:1297 and 51; SEQ ID NOS:1299 and 51; SEQ ID NOS:1301 and 51; SEQ ID NOS:1303 and 51; and SEQ ID NOS:1305 and 51, or a variant thereof, as well as those depicted in the FIGS. 56 and 58.

[0438] NKG2D antigen binding domain sequences or NKG2D ABD V_{H}/V_{L} pairs finding particular use in these embodiments include, but are not limited to, 1D2B4_H1_L1; 1D2B4_L1_H1; ADI27744_A44_H0_L0; ADI27744_A44_L0_H0; ADI27749_A49_H0_L0; ADI27749_A49_L0_H0; 1D7B4_H1_L1; 1D7B4_L1_H1; 1D7B4_H1.3_L1; 1D7B4_L1_H1.3; 1D7B4_H1.23_L1; 1D7B4_L1_H1.23; 1D7B4_H1.28_L1; 1D7B4_L1_H1.28; 1D7B4_H1.31_L1; 1D7B4_L1_H1.31; 1D7B4_H1.33_L1; 1D7B4_L1_H1.33, or a variant thereof. In certain embodiments, the αNKG2D ABD V_{H}/V_{L} pairs are selected from the group including: ADI27744_A44_H0_L0; ADI27749_A44_H0_L0; 1D7B4_H1.3_L1; 1D7B4_H1.23_L1; 1D7B4_H1.28_L1; 1D7B4_H1.31_L1; 1D7B4_H1.33_L1, as well as V_{H}/V_{L} sequence pairs provided in SEQ ID NOS:1308, 1310, 1312, 1314 and 1316. In particular embodiments, the NKG2D scFv is any one selected from the group including those in SEQ ID NOS:1308, 1310, 1312, 1314 and 1316.

[0439] Any suitable B7H3 ABD can be included in the 2+1 Fab₂-scFv-Fc format antibody, including those provided herein. B7H3 ABDs that are of particular use in these embodiments include, but are not limited to, V_{H} and V_{L} domains selected from have V_{H}/V_{L} pairs selected from the group including: 38E2_H2_L1.1; 38E2_L1.1_H2; 6A1_H1_L1; 6A1_L1_H1; 2E4A3.189_H1_L1; 2E4A3.189_L1_H1; 2E4A3.189_H1.22_L1; 2E4A3.189_L1_H1.22, or a variant thereof, as well as those depicted in FIGS. 13 and 14. In certain embodiments, the αB7H3 ABD V_{H}/V_{L} pairs are selected from the group including: 2E4A3.189_H1.22_L1; 38E2_H2_L1.1, 6A1_H1_L1; SEQ ID NOS:140 and 141; SEQ ID NOS:242 and 246; SEQ ID NOS:145 and 51; or variants thereof, as well as those depicted in the FIGS. 13 and 14.

[0440] An exemplary anti-B7H3×anti-NKG2D 2+1 Fab₂-scFv-Fc format antibody comprising B7H3 Fab portions and an NKG2D scFv is presented in FIG. 20 as well as SEQ ID NOS:4, 48 and 6. Other exemplary 2+1 Fab₂-scFv-Fc format antibodies specific for B7H3 and NKG2D are shown in FIG. 56, such as XENP40584, XENP40587, XENP40590, XENP40888, XENP41337, XENP41338, XENP41339, and XENP41340, as well as in the sequence listing.

[0441] 3. 2+1 mAb-scFv Format

[0442] One heterodimeric scaffold that finds particular use in the antibodies described herein is the mAb-scFv format (FIG. 15C). In this embodiment, the format relies on the use of a C-terminal attachment of a scFv to one of the monomers, thus forming a third antigen binding domain, wherein the Fab portions of the two monomers bind, for example, B7H3 and the “extra” scFv domain, for example, binds NKG2D. Thus, the first monomer comprises a first heavy chain (comprising a variable heavy domain and a constant domain), with a C-terminally covalently attached scFv comprising a scFv variable light domain, an scFv linker and a scFv variable heavy domain in either orientation (VH1-CH1-hinge-CH2-CH3-[optional linker]-VH2-scFv linker-VL2 or VH1-CH1-hinge-CH2-CH3-[optional linker]-VL2-scFv linker-VH2). This embodiment further utilizes a common light chain comprising a variable light domain and a constant light domain, that associates with the heavy chains to form two identical Fabs that bind B7H3. In some embodiments, an exemplary mAb-scFv format includes a first Fc comprising an N-terminal Fab arm that binds B7H3 and a second Fc comprising an N-terminal Fab arm that binds B7H3 and a C-terminal scFv that binds NKG2D. Such as format can include a first monomer comprising, from the N-terminus to the C-terminus, VH1-CH1-hinge-CH2-CH3, a second monomer comprising, from the N-terminus to the C-terminus, VH1-CH1-hinge-CH2-CH3-scFv, and a third monomer comprising, from the N-terminus to the C-terminus, V_{L}-C_{L}, wherein the first VH1-V_{L} pair bind B7H3, the second VH1-V_{L} pair bind B7H3, and the scFv binds NKG2D. In another embodiment of the mAb-scFv, the first and second VH1-V_{L} pairs bind NKG2D and the scFv binds B7H3.

[0443] In some embodiments, one or both Fc domains of these constructs can include one or more of: (i) FcγRIIIa variants, (ii) pI variants, (iii) skew variants, and (iv) FcRn variants, as well as any combination thereof, as desired and described herein. In certain embodiments, the Fc domains of the 2+1 mAb-scFv format contain FcγRIIIa variants, skew variants, pI variants, and optionally FcRn variants. In some embodiments, such Fc domains include asymmetric FcγRIIIa variants such that one Fc domain includes S239D/I332E substitutions, and the other Fc domain includes no FcγRIIIa variants, amino acid substitution(s) selected from the group including S239D, I332E, S239D/I332E, G236A, S239E, I332D, G236A/I332E, S239D/I332E/A330L, I332E/A330L, F243L, S298A, E333A, K334A, S298A/E333A, and S298A/E333A/K334A. In many embodiments, the Fc domains generally include skew variants (e.g., a set of amino acid substitutions as shown in FIG. 1, with particularly useful skew variants being selected from the group including: S364K/E357Q:L368D/K370S; L368D/K370S:S364K; L368E/K370S:S364K; T411E/K360E/Q362E:D401K; L368D/K370S:S364K/E357L; K370S:S364K/E357Q; T366S/L368A/Y407V:T366W and T366S/L368A/Y407V/Y349C:T366W/S354C), and optionally FcRn variants (including M428L/N434S, M428L/N434A or M252Y/S254T/T256E), optionally charged scFv linkers (including those shown in FIG. 5), optionally ablation variants (including those shown in FIG. 3), and the heavy chain comprises pI variants (including those shown in FIG. 2).

[0444] Some exemplary Fc domain sequences that are useful in the 2+1 mAb-scFv format antibodies are shown in the figures, such as FIGS. 9, 35, 50-53, and 60. The “monomer 1” sequences depicted in such figures typically refer to the Fc domain of the “Fab-Fc heavy chain” and the “monomer 2” sequences refer to the Fc domain of the “scFv-Fc heavy chain.” Further, FIG. 10 provides useful C_{L} sequences that can be used with this format.

[0445] In some embodiments, the heterodimeric Fc backbones of the first and second monomers of the mAb-scFv format include a backbone pair set forth in FIG. 53 including those pairs of SEQ ID NOS:875-876, 877-878, 879-880, 881-882, 883-884, 885-886, 887 and 889, 890-891, 892-893, 894-895, 896-897, 898-899, 900-901, 902-903, 904-905, 906-907, 908-909, 910-911, 912-913, 914-915, 916-917, 918-919, 920-921, 922-923, 924-925, 926-927, 928-929, 930-931, 932-933, 934-935, 936-937, and 938-939. In some embodiments, the heterodimeric Fc backbones include amino acid substitutions such that the Fc domains have increased ADCC activity. In certain embodiments, the heterodimeric Fc backbone also includes a variant for increasing serum half-life, include, but not limited to, the M428L/N434S, M428L/N434A or M252Y/S254T/T256E variants.

[0446] The antibodies described herein provide mAb-scFv formats, where the NKG2D binding domain sequences are shown in FIGS. 23 and 58 or a variant thereof and the B7H3 binding domain sequences are shown in FIGS. 13 and 14 or a variant thereof.

[0447] Any suitable NKG2D ABD can be included in the 2+1 mAb-scFv format antibody, included those provided herein. NKG2D antigen binding domain sequences that are of particular use in these embodiments include, but are not limited to, V_{H} and V_{L} domains selected from have V_{H}/V_{L} pairs selected from the group including: 1D7B4_H1_L1; 1D2B4_H0_L0; mAb-C_H0_L0; mAb-D_H0_L0; 1D7B4_L1_H1; 1D2B4_L0_H0; mAb-C_L0_H0; mAb-D_L0_H0; 1D7B4_H1.1_L1; 1D7B4_H1.2_L1; 1D7B4_H1.3_L1; 1D7B4_H1.4_L1; 1D7B4_H1.5_L1; 1D7B4_H1.6_L1; 1D7B4_H1.7_L1; 1D7B4_H1.8_L1; 1D7B4_H1.9_L1; 1D7B4_H1.10_L1; 1D7B4_H1.11_L1; 1D7B4_H1.12_L1; 1D7B4_H1.13_L1; 1D7B4_H1.14_L1; 1D7B4_H1.15_L1; 1D7B4_H1.16_L1; 1D7B4_H1.17_L1; 1D7B4_H1.18_L1; 1D7B4_H1.19_L1; 1D7B4_H1.20_L1; 1D7B4_H1.21_L1; 1D7B4_H1.22_L1; 1D7B4_H1.23_L1; 1D7B4_H1.24_L1; 1D7B4_H1.25_L1; 1D7B4_H1.26_L1; 1D7B4_H1.27_L1; 1D7B4_H1.28_L1; 1D7B4_H1.29_L1; 1D7B4_H1.30_L1; 1D7B4_H1.31_L1; 1D7B4_H1.32_L1; 1D7B4_H1.3_L13; 1D7B4_H1.34_L1; 1D7B4_H1.35_L1; 1D7B4_H1.36_L1; 1D7B4_H1.37_L1; 1D7B4_H1.38_L1; 1D7B4_H1.39_L1; 1D7B4_H1.40_L1; 1D7B4_H1.41_L1; 1D7B4_H1.42_L1; 1D7B4_H1.43_L1; 1D7B4_H1.44_L1; 1D7B4_H1.45_L1; 1D7B4_H1.46_L1; 1D7B4_H1.47_L1; 1D7B4_H1.48_L1; 1D7B4_L1_H1.1; 1D7B4_L1_H1.2; 1D7B4_L1_H1.3; 1D7B4_L1_H1.4; 1D7B4_L1_H1.5; 1D7B4_L1_H1.6; 1D7B4_L1_H1.7; 1D7B4_L1_H1.8; 1D7B4_L1_H1.9; 1D7B4_L1_H1.10; 1D7B4_L1_H1.11; 1D7B4_L1_H1.12; 1D7B4_L1_H1.13; 1D7B4_L1_H1.14; 1D7B4_L1_H1.15; 1D7B4_L1_H1.16; 1D7B4_L1_H1.17; 1D7B4_L1_H1.18; 1D7B4_L1_H1.19; 1D7B4_L1_H1.20; 1D7B4_L1_H1.21; 1D7B4_L1_H1.22; 1D7B4_L1_H1.23; 1D7B4_L1_H1.24; 1D7B4_L1_H1.25; 1D7B4_L1_H1.26; 1D7B4_L1_H1.27; 1D7B4_L1_H1.28; 1D7B4_L1_H1.29; 1D7B4_L1_H1.30; 1D7B4_L1_H1.31; 1D7B4_L1_H1.32; 1D7B4_L1_H1.33; 1D7B4_L1_H1.34; 1D7B4_L1_H1.35; 1D7B4_L1_H1.36; 1D7B4_L1_H1.37; 1D7B4_L1_H1.38; 1D7B4_L1_H1.39; 1D7B4_L1_H1.40; 1D7B4_L1_H1.41; 1D7B4_L1_H1.42; 1D7B4_L1_H1.43; 1D7B4_L1_H1.44; 1D7B4_L1_H1.45; 1D7B4_L1_H1.46; 1D7B4_L1_H1.47; 1D7B4_L1_H1.48; 1D2B4_H1_L1; 1D2B4_L1_H1; ADI27744_A44_H0_L0; ADI27744_A44_L0_H0; ADI27749_A49_H0_L0; ADI27749_A49_L0_H0; or variants thereof, as well as those depicted in FIGS. 19, 56, 58 and 59.

[0448] In some embodiments, the αNKG2D ABD V_{H}/V_{L} pairs are found in, for example, SEQ ID NOS:1020 and 3; SEQ ID NOS:1022 and 3; SEQ ID NOS:1023 and 1024; SEQ ID NOS:1025 and 1026; SEQ ID NOS:1211 and 51; SEQ ID NOS:1213 and 51; SEQ ID NOS:1215 and 51; SEQ ID NOS:1217 and 51; SEQ ID NOS:1219 and 51; SEQ ID NOS:1221 and 51; SEQ ID NOS:1223 and 51; SEQ ID NOS:1225 and 51; SEQ ID NOS:1227 and 51; SEQ ID NOS:1229 and 51; SEQ ID NOS:1231 and 51; SEQ ID NOS:1233 and 51; SEQ ID NOS:1235 and 51; SEQ ID NOS:1237 and 51; SEQ ID NOS:1239 and 51; SEQ ID NOS:1241 and 51; SEQ ID NOS:1243 and 51; SEQ ID NOS:1245 and 51; SEQ ID NOS:1247 and 51; SEQ ID NOS:1249 and 51; SEQ ID NOS:1251 and 51; SEQ ID NOS:1253 and 51; SEQ ID NOS:1255 and 51; SEQ ID NOS:1257 and 51; SEQ ID NOS:1259 and 51; SEQ ID NOS:1261 and 51; SEQ ID NOS:1263 and 51; SEQ ID NOS:1265 and 51; SEQ ID NOS:1267 and 51; SEQ ID NOS:1269 and 51; SEQ ID NOS:1271 and 51; SEQ ID NOS:1273 and 51; SEQ ID NOS:1275 and 51; SEQ ID NOS:1277 and 51; SEQ ID NOS:1279 and 51; SEQ ID NOS:1281 and 51; SEQ ID NOS:1283 and 51; SEQ ID NOS:1285 and 51; SEQ ID NOS:1287 and 51; SEQ ID NOS:1289 and 51; SEQ ID NOS:1291 and 51; SEQ ID NOS:1293 and 51; SEQ ID NOS:1295 and 51; SEQ ID NOS:1297 and 51; SEQ ID NOS:1299 and 51; SEQ ID NOS:1301 and 51; SEQ ID NOS:1303 and 51; and SEQ ID NOS:1305 and 51, or a variant thereof, as well as those depicted in the FIGS. 56 and 58.

[0449] NKG2D antigen binding domain sequences or NKG2D ABD V_{H}/V_{L} pairs finding particular use in these embodiments include, but are not limited to, 1D2B4_H1_L1; 1D2B4_L1_H1; ADI27744_A44_H0_L0; ADI27744_A44_L0_H0; ADI27749_A49_H0_L0; ADI27749_A49_L0_H0; 1D7B4_H1_L1; 1D7B4_L1_H1; 1D7B4_H1.3_L1; 1D7B4_L1_H1.3; 1D7B4_H1.23_L1; 1D7B4_L1_H1.23; 1D7B4_H1.28_L1; 1D7B4_L1_H1.28; 1D7B4_H1.31_L1; 1D7B4_L1_H1.31; 1D7B4_H1.33_L1; 1D7B4_L1_H1.33, or a variant thereof. In certain embodiments, the αNKG2D ABD V_{H}/V_{L} pairs are selected from the group including: ADI27744_A44_H0_L0; ADI27749_A44_H0_L0; 1D7B4_H1.3_L1; 1D7B4_H1.23_L1; 1D7B4_H1.28_L1; 1D7B4_H1.31_L1; 1D7B4_H1.33_L1, as well as V_{H}/V_{L} sequence pairs provided in SEQ ID NOS:1308, 1310, 1312, 1314 and 1316. In particular embodiments, the NKG2D scFv is any one selected from the group including those in SEQ ID NOS:1308, 1310, 1312, 1314 and 1316.

[0450] Any suitable B7H3 ABD can be included in the 2+1 mAb-scFv format antibody, including those provided herein. B7H3 ABDs that are of particular use in these embodiments include, but are not limited to, V_{H} and V_{L} domains selected from have V_{H}/V_{L} pairs selected from the group including: 38E2_H2_L1.1; 38E2_L1.1_H2; 6A1_H1_L1; 6A1_L1_H1; 2E4A3.189_H1_L1; 2E4A3.189_L1_H1; 2E4A3.189_H1.22_L1; 2E4A3.189_L1_H1.22, or a variant thereof, as well as those depicted in FIGS. 13 and 14. In certain embodiments, the αB7H3 ABD V_{H}/V_{L} pairs are selected from the group including: 2E4A3.189_H1.22_L1; 38E2_H2_L1.1, 6A1_H1_L1; SEQ ID NOS:140 and 141; SEQ ID NOS:242 and 246; SEQ ID NOS:145 and 51; or variants thereof, as well as those depicted in the FIGS. 13 and 14.

[0451] Exemplary anti-B7H3×anti-NKG2D 2+1 mAb-scFv format antibody is depicted in FIG. 21, as well as SEQ ID NOS:4, 49 and 6. Other exemplary 2+1 mAb-scFv format antibodies are depicted in FIG. 56, such as XENP40552, XENP40555, XENP40557, XENP40558, XENP40559, XENP40891, XENP41341, XENP41342, XENP41343, and XENP41344, as well as in the sequence listing.

[0452] 4. 2+1 stackFab₂-scFv-Fc Format

[0453] Another heterodimeric scaffold that finds particular use in the antibodies described herein is the stackFab₂-scFv-Fc format (FIG. 15D).

[0454] In this embodiment, the format relies on the use of a stacked Fab portions that bind, for example B7H3, and an scFv domain that binds, for example, NKG2D. In this format, a first monomer comprises, from N-terminus to C-terminus, a first heavy chain (comprising a variable heavy domain and a constant domain), a domain linker, and a second heavy chain (comprising a variable heavy domain and a constant domain) and a first Fc domain; a second monomer comprises, from N-terminus to C-terminus, scFv comprising a scFv variable light domain, an scFv linker and a scFv variable heavy domain in either orientation (VH1-CH1-hinge-CH2-CH3-[optional linker]-VH2-scFv linker-VL2 or VH1-CH1-hinge-CH2-CH3-[optional linker]-VL2-scFv linker-VH2), and a second Fc domain; and a third monomer comprising a common light chain including a variable light domain and a constant light domain. This embodiment further utilizes a common light chain comprising a variable light domain and a constant light domain, that associates with the heavy chains to form two identical Fabs that bind B7H3. In some embodiments, the first Fc domain of the Fab monomer comprises the sequence of SEQ ID NO:147 and the second Fc domain of the scFv monomer comprises the sequence of SEQ ID NO:148, also shown in FIG. 18.

[0455] In some embodiments, one or both Fc domains of these constructs can include one or more of: (i) FcγRIIIa variants, (ii) pI variants, (iii) skew variants, and (iv) FcRn variants, as well as any combination thereof, as desired and described herein. In certain embodiments, the Fc domains of the stackFab₂-scFv-Fc format contain FcγRIIIa variants, skew variants, pI variants, and optionally FcRn variants. In many embodiments, the Fc domains of the stackFab₂-scFv-Fc format contain FcγRIIIa variants, skew variants, pI variants, and FcRn variants. In some embodiments, such Fc domains include asymmetric FcγRIIIa variants such that one Fc domain includes S239D/I332E substitutions, and the other Fc domain includes no FcγRIIIa variants, amino acid substitution(s) selected from the group including S239D, I332E, S239D/I332E, G236A, S239E, I332D, G236A/I332E, S239D/I332E/A330L, I332E/A330L, F243L, S298A, E333A, K334A, S298A/E333A, and S298A/E333A/K334A. In many embodiments, the Fc domains generally include skew variants (e.g., a set of amino acid substitutions as shown in FIG. 1, with particularly useful skew variants being selected from the group including: S364K/E357Q:L368D/K370S; L368D/K370S:S364K; L368E/K370S:S364K; T411E/K360E/Q362E:D401K; L368D/K370S:S364K/E357L; K370S:S364K/E357Q; T366S/L368A/Y407V:T366W and T366S/L368A/Y407V/Y349C:T366W/S354C), and optionally FcRn variants (including M428L/N434S, M428L/N434A or M252Y/S254T/T256E), optionally charged scFv linkers (including those shown in FIG. 5), optionally ablation variants (including those shown in FIG. 3), and the heavy chain comprises pI variants (including those shown in FIG. 2).

[0456] FIGS. 7-9, 35, 50-53 and 60 show some exemplary Fc domain sequences or variants thereof that are useful in the stackFab₂-scFv-Fc format antibodies.

[0457] Any suitable NKG2D ABD can be included in the stackFab₂-scFv-Fc format antibody, included those provided herein. NKG2D antigen binding domain sequences that are of particular use in these embodiments include, but are not limited to, V_{H} and V_{L} domains selected from have V_{H}/V_{L} pairs selected from the group including: 1D7B4_H1_L1; 1D2B4_H0_L0; mAb-C_H0_L0; mAb-D_H0_L0; 1D7B4_L1_H1; 1D2B4_L0_H0; mAb-C_L0_H0; mAb-D_L0_H0; 1D7B4_H1.1_L1; 1D7B4_H1.2_L1; 1D7B4_H1.3_L1; 1D7B4_H1.4_L1; 1D7B4_H1.5_L1; 1D7B4_H1.6_L1; 1D7B4_H1.7_L1; 1D7B4_H1.8_L1; 1D7B4_H1.9_L1; 1D7B4_H1.10_L1; 1D7B4_H1.11_L1; 1D7B4_H1.12_L1; 1D7B4_H1.13_L1; 1D7B4_H1.14_L1; 1D7B4_H1.15_L1; 1D7B4_H1.16_L1; 1D7B4_H1.17_L1; 1D7B4_H1.18_L1; 1D7B4_H1.19_L1; 1D7B4_H1.20_L1; 1D7B4_H1.21_L1; 1D7B4_H1.22_L1; 1D7B4_H1.23_L1; 1D7B4_H1.24_L1; 1D7B4_H1.25_L1; 1D7B4_H1.26_L1; 1D7B4_H1.27_L1; 1D7B4_H1.28_L1; 1D7B4_H1.29_L1; 1D7B4_H1.30_L1; 1D7B4_H1.31_L1; 1D7B4_H1.32_L1; 1D7B4_H1.3_L13; 1D7B4_H1.34_L1; 1D7B4_H1.35_L1; 1D7B4_H1.36_L1; 1D7B4_H1.37_L1; 1D7B4_H1.38_L1; 1D7B4_H1.39_L1; 1D7B4_H1.40_L1; 1D7B4_H1.41_L1; 1D7B4_H1.42_L1; 1D7B4_H1.43_L1; 1D7B4_H1.44_L1; 1D7B4_H1.45_L1; 1D7B4_H1.46_L1; 1D7B4_H1.47_L1; 1D7B4_H1.48_L1; 1D7B4_L1_H1.1; 1D7B4_L1_H1.2; 1D7B4_L1_H1.3; 1D7B4_L1_H1.4; 1D7B4_L1_H1.5; 1D7B4_L1_H1.6; 1D7B4_L1_H1.7; 1D7B4_L1_H1.8; 1D7B4_L1_H1.9; 1D7B4_L1_H1.10; 1D7B4_L1_H1.11; 1D7B4_L1_H1.12; 1D7B4_L1_H1.13; 1D7B4_L1_H1.14; 1D7B4_L1_H1.15; 1D7B4_L1_H1.16; 1D7B4_L1_H1.17; 1D7B4_L1_H1.18; 1D7B4_L1_H1.19; 1D7B4_L1_H1.20; 1D7B4_L1_H1.21; 1D7B4_L1_H1.22; 1D7B4_L1_H1.23; 1D7B4_L1_H1.24; 1D7B4_L1_H1.25; 1D7B4_L1_H1.26; 1D7B4_L1_H1.27; 1D7B4_L1_H1.28; 1D7B4_L1_H1.29; 1D7B4_L1_H1.30; 1D7B4_L1_H1.31; 1D7B4_L1_H1.32; 1D7B4_L1_H1.33; 1D7B4_L1_H1.34; 1D7B4_L1_H1.35; 1D7B4_L1_H1.36; 1D7B4_L1_H1.37; 1D7B4_L1_H1.38; 1D7B4_L1_H1.39; 1D7B4_L1_H1.40; 1D7B4_L1_H1.41; 1D7B4_L1_H1.42; 1D7B4_L1_H1.43; 1D7B4_L1_H1.44; 1D7B4_L1_H1.45; 1D7B4_L1_H1.46; 1D7B4_L1_H1.47; 1D7B4_L1_H1.48; 1D2B4_H1_L1; 1D2B4_L1_H1; ADI27744_A44_H0_L0; ADI27744_A44_L0_H0; ADI27749_A49_H0_L0; ADI27749_A49_L0_H0; or variants thereof, as well as those depicted in FIGS. 19, 56, 58 and 59.

[0458] In some embodiments, the αNKG2D ABD V_{H}/V_{L} pairs are found in, for example, SEQ ID NOS:1020 and 3; SEQ ID NOS:1022 and 3; SEQ ID NOS:1023 and 1024; SEQ ID NOS:1025 and 1026; SEQ ID NOS:1211 and 51; SEQ ID NOS:1213 and 51; SEQ ID NOS:1215 and 51; SEQ ID NOS:1217 and 51; SEQ ID NOS:1219 and 51; SEQ ID NOS:1221 and 51; SEQ ID NOS:1223 and 51; SEQ ID NOS:1225 and 51; SEQ ID NOS:1227 and 51; SEQ ID NOS:1229 and 51; SEQ ID NOS:1231 and 51; SEQ ID NOS:1233 and 51; SEQ ID NOS:1235 and 51; SEQ ID NOS:1237 and 51; SEQ ID NOS:1239 and 51; SEQ ID NOS:1241 and 51; SEQ ID NOS:1243 and 51; SEQ ID NOS:1245 and 51; SEQ ID NOS:1247 and 51; SEQ ID NOS:1249 and 51; SEQ ID NOS:1251 and 51; SEQ ID NOS:1253 and 51; SEQ ID NOS:1255 and 51; SEQ ID NOS:1257 and 51; SEQ ID NOS:1259 and 51; SEQ ID NOS:1261 and 51; SEQ ID NOS:1263 and 51; SEQ ID NOS:1265 and 51; SEQ ID NOS:1267 and 51; SEQ ID NOS:1269 and 51; SEQ ID NOS:1271 and 51; SEQ ID NOS:1273 and 51; SEQ ID NOS:1275 and 51; SEQ ID NOS:1277 and 51; SEQ ID NOS:1279 and 51; SEQ ID NOS:1281 and 51; SEQ ID NOS:1283 and 51; SEQ ID NOS:1285 and 51; SEQ ID NOS:1287 and 51; SEQ ID NOS:1289 and 51; SEQ ID NOS:1291 and 51; SEQ ID NOS:1293 and 51; SEQ ID NOS:1295 and 51; SEQ ID NOS:1297 and 51; SEQ ID NOS:1299 and 51; SEQ ID NOS:1301 and 51; SEQ ID NOS:1303 and 51; and SEQ ID NOS:1305 and 51, or a variant thereof, as well as those depicted in the FIGS. 56 and 58.

[0459] NKG2D antigen binding domain sequences or NKG2D ABD V_{H}/V_{L} pairs finding particular use in these embodiments include, but are not limited to, 1D2B4_H1_L1; 1D2B4_L1_H1; ADI27744_A44_H0_L0; ADI27744_A44_L0_H0; ADI27749_A49_H0_L0; ADI27749_A49_L0_H0; 1D7B4_H1_L1; 1D7B4_L1_H1; 1D7B4_H1.3_L1; 1D7B4_L1_H1.3; 1D7B4_H1.23_L1; 1D7B4_L1_H1.23; 1D7B4_H1.28_L1; 1D7B4_L1_H1.28; 1D7B4_H1.31_L1; 1D7B4_L1_H1.31; 1D7B4_H1.33_L1; 1D7B4_L1_H1.33, or a variant thereof. In certain embodiments, the αNKG2D ABD V_{H}/V_{L} pairs are selected from the group including: ADI27744_A44_H0_L0; ADI27749_A44_H0_L0; 1D7B4_H1.3_L1; 1D7B4_H1.23_L1; 1D7B4_H1.28_L1; 1D7B4_H1.31_L1; 1D7B4_H1.33_L1, as well as V_{H}/V_{L} sequence pairs provided in SEQ ID NOS:1308, 1310, 1312, 1314 and 1316. In particular embodiments, the NKG2D scFv is any one selected from the group including those in SEQ ID NOS:1308, 1310, 1312, 1314 and 1316.

[0460] Any suitable B7H3 ABD can be included in the 2+1 mAb-scFv format antibody, including those provided herein. B7H3 ABDs that are of particular use in these embodiments include, but are not limited to, V_{H} and V_{L} domains selected from have V_{H}/V_{L} pairs selected from the group including: 38E2_H2_L1.1; 38E2_L1.1_H2; 6A1_H1_L1; 6A1_L1_H1; 2E4A3.189_H1_L1; 2E4A3.189_L1_H1; 2E4A3.189_H1.22_L1; 2E4A3.189_L1_H1.22, or a variant thereof, as well as those depicted in FIGS. 13 and 14. In certain embodiments, the αB7H3 ABD V_{H}/V_{L} pairs are selected from the group including: 2E4A3.189_H1.22_L1; 38E2_H2_L1.1, 6A1_H1_L1; SEQ ID NOS:140 and 141; SEQ ID NOS:242 and 246; SEQ ID NOS:145 and 51; or variants thereof, as well as those depicted in the FIGS. 13 and 14.

[0461] An exemplary anti-B7H3×anti-NKG2D 2+1 stackFab₂-scFv format antibody is depicted in FIG. 57, as well as SEQ ID NOS: 1209, 1210 and 6.

[0462] 5. 1+1 CLC Format

[0463] One heterodimeric scaffold that finds particular use in the antibodies described herein is the “1+1 common light chain” (or “1+1 CLC”) format, as shown in FIG. 2 of U.S. Pat. No. 10,793,632, hereby incorporated by reference in its entirety including the figures and legends. The 1+1 CLC format antibody includes: a first monomer that includes a VH1-CH1-hinge-CH2-CH3, wherein VH1 is a first variable heavy domain and CH2-CH3 is a first Fc domain; a second monomer that includes a VH2-CH1-hinge-CH2-CH3, wherein VH2 is a second variable heavy domain and CH2-CH3 is a second Fc domain; and a third monomer “common light chain” comprising V_{L}-C_{L}, wherein V_{L} is a common variable light domain and C_{L} is a constant light domain. In such embodiments, the V_{L} pairs with the VH1 to form a first binding domain with a first antigen binding specificity; and the V_{L} pairs with the VH2 to form a second binding domain with a second antigen binding specificity. In some embodiments, the 1+1 CLC format antibody is a bivalent antibody. In some embodiments, one or both Fc domains of these constructs can include one or more of: (i) FcγRIIIa variants, (ii) pI variants, (iii) skew variants, and (iv) FcRn variants, as well as any combination thereof, as desired and described herein. In certain embodiments, the Fc domains of the 1+1 Fab-scFv-Fc format contain FcγRIIIa variants, skew variants, pI variants, and optionally FcRn variants. In some embodiments, such Fc domains include asymmetric FcγRIIIa variants such that one Fc domain includes S239D/I332E substitutions, and the other Fc domain includes no FcγRIIIa variants, amino acid substitution(s) selected from the group including S239D, I332E, S239D/I332E, G236A, S239E, I332D, G236A/I332E, S239D/I332E/A330L, I332E/A330L, F243L, S298A, E333A, K334A, S298A/E333A, and S298A/E333A/K334A. In many embodiments, the Fc domains generally include skew variants (e.g., a set of amino acid substitutions as shown in FIG. 1, with particularly useful skew variants being selected from the group including: S364K/E357Q:L368D/K370S; L368D/K370S:S364K; L368E/K370S:S364K; T411E/K360E/Q362E:D401K; L368D/K370S:S364K/E357L; K370S:S364K/E357Q; T366S/L368A/Y407V:T366W and T366S/L368A/Y407V/Y349C:T366W/S354C), and optionally FcRn variants (including M428L/N434S, M428L/N434A or M252Y/S254T/T256E), optionally charged scFv linkers (including those shown in FIG. 5), optionally ablation variants (including those shown in FIG. 3), and the heavy chain comprises pI variants (including those shown in FIG. 2).

[0464] In some embodiments, one of the first or second antigen binding domains is an NK cell antigen binding domain. Any suitable NKG2D antigen binding domain (as described herein and in the Figures and sequence listing) or a variant thereof can be included in the subject 1+1 CLC format antibody.

[0465] In some embodiments, one of the first or second antigen binding domains is a B7H3 antigen binding domain. Any suitable B7H3 binding domain (as described herein and in the Figures and sequence listing) or a variant thereof can be included in the subject 1+1 CLC format antibody.

[0466] 6. 2+1 CLC Format

[0467] One heterodimeric scaffold that finds particular use in the antibodies described herein is the “2+1 common light chain” (or (“2+1 CLC”) format, as shown in FIG. 2 of U.S. Pat. No. 10,793,632, hereby incorporated by reference in its entirety including the figures and legends. The 2+1 CLC format includes: a first monomer that includes a VH1-CH1-linker-VH1-CH1-hinge-CH2-CH3, wherein the first and second VH1 are each a first variable heavy domain and CH2-CH3 is a first Fc domain; a second monomer that includes a VH2-CH1-hinge-CH2-CH3, wherein VH2 is a second variable heavy domain and CH2-CH3 is a second Fc domain; and a third monomer that includes a “common light chain” V_{L}-C_{L}, wherein V_{L} is a common variable light domain and C_{L} is a constant light domain. The V_{L} domain pairs with each of the VH1 domains of the first monomer to form two first binding domains, each with a first antigen binding specificity; and the V_{L} pairs with the VH2 to form a second binding domain with a second antigen binding specificity. The linker of the first monomer can be any suitable linker, including, but not limited to, any one of the domain linkers described in FIG. 6 (see, e.g., SEQ ID NOS: 87, 98, 109-130, and 203-206). In some embodiments, the linker is EPKSCGKPGSGKPGS (SEQ ID NO: 205). In some embodiments, the 2+1 CLC format antibody is a trivalent antibody. In some embodiments, the first antigen binding specificity is to NKG2D such as the ECD of NKG2D and the second antigen binding specificity is for B7H3 such as the ECD of B7H3. In other embodiments, the first antigen binding specificity is for B7H3 such as the ECD of B7H3 and the second antigen binding specificity is for NKG2D such as the ECD of NKG2D. In some embodiments, one or both Fc domains of these constructs can include one or more of: (i) FcγRIIIa variants, (ii) pI variants, (iii) skew variants, and (iv) FcRn variants, as well as any combination thereof, as desired and described herein. In certain embodiments, the Fc domains of the 1+1 Fab-scFv-Fc format contain FcγRIIIa variants, skew variants, pI variants, and optionally FcRn variants. In some embodiments, such Fc domains include asymmetric FcγRIIIa variants such that one Fc domain includes S239D/I332E substitutions, and the other Fc domain includes no FcγRIIIa variants, amino acid substitution(s) selected from the group including S239D, I332E, S239D/I332E, G236A, S239E, I332D, G236A/I332E, S239D/I332E/A330L, I332E/A330L, F243L, S298A, E333A, K334A, S298A/E333A, and S298A/E333A/K334A. In many embodiments, the Fc domains generally include skew variants (e.g., a set of amino acid substitutions as shown in FIG. 1, with particularly useful skew variants being selected from the group including: S364K/E357Q:L368D/K370S; L368D/K370S:S364K; L368E/K370S:S364K; T411E/K360E/Q362E:D401K; L368D/K370S:S364K/E357L; K370S:S364K/E357Q; T366S/L368A/Y407V:T366W and T366S/L368A/Y407V/Y349C:T366W/S354C), and optionally FcRn variants (including M428L/N434S, M428L/N434A or M252Y/S254T/T256E), optionally charged scFv linkers (including those shown in FIG. 5), optionally ablation variants (including those shown in FIG. 3), and the heavy chain comprises pI variants (including those shown in FIG. 2).

[0468] In some embodiments, each of the first antigen binding domains or the second antigen binding domain is an NKG2D antigen binding domain. Any suitable NKG2D antigen binding domain (as described herein and in the figures and sequence listing) or a variant thereof can be included in the subject 2+1 CLC format antibody.

[0469] In some embodiments, each of the first antigen binding domains or the second antigen binding domain is a B7H3 binding domain. Any suitable B7H3 antigen binding domain (as described herein and in the figures and sequence listing) or a variant thereof can be included in the subject 2+1 CLC format antibody.

[0470] 7. mAb-Fv Format

[0471] One heterodimeric scaffold that finds particular use in the antibodies described herein is the “mAb-Fv” format, as shown in FIG. 2 of U.S. Pat. No. 10,793,632, hereby incorporated by reference in its entirety including the figures and legends. In one embodiment, the format relies on the use of a C-terminal attachment of an “extra” variable heavy domain to one monomer and the C-terminal attachment of an “extra” variable light domain to the other monomer, thus forming a third ABD (i.e., an “extra” Fv domain), wherein the Fab portions of the two monomers bind the ECD of B7H3 and the “extra” scFv domain binds the ECD of NKG2D. In another embodiment, the format relies on the use of a C-terminal attachment of an “extra” variable heavy domain to one monomer and the C-terminal attachment of an “extra” variable light domain to the other monomer, thus forming a third ABD (i.e., an “extra” Fv domain), wherein the Fab portions of the two monomers bind the ECD of NKG2D and the “extra” scFv domain binds the ECD of B7H3. In some embodiments, one or both Fc domains of these constructs can include one or more of: (i) FcγRIIIa variants, (ii) pI variants, (iii) skew variants, and (iv) FcRn variants, as well as any combination thereof, as desired and described herein. In certain embodiments, the Fc domains of the 1+1 Fab-scFv-Fc format contain FcγRIIIa variants, skew variants, pI variants, and optionally FcRn variants. In some embodiments, such Fc domains include asymmetric FcγRIIIa variants such that one Fc domain includes S239D/I332E substitutions, and the other Fc domain includes no FcγRIIIa variants, amino acid substitution(s) selected from the group including S239D, I332E, S239D/I332E, G236A, S239E, I332D, G236A/I332E, S239D/I332E/A330L, I332E/A330L, F243L, S298A, E333A, K334A, S298A/E333A, and S298A/E333A/K334A. In many embodiments, the Fc domains generally include skew variants (e.g., a set of amino acid substitutions as shown in FIG. 1, with particularly useful skew variants being selected from the group including: S364K/E357Q:L368D/K370S; L368D/K370S:S364K; L368E/K370S:S364K; T411E/K360E/Q362E:D401K; L368D/K370S:S364K/E357L; K370S:S364K/E357Q; T366S/L368A/Y407V:T366W and T366S/L368A/Y407V/Y349C:T366W/S354C), and optionally FcRn variants (including M428L/N434S or M428L/N434A), optionally charged scFv linkers (including those shown in FIG. 5), optionally ablation variants (including those shown in FIG. 3), and the heavy chain comprises pI variants (including those shown in FIG. 2).

[0472] In this embodiment, the first monomer comprises: a first heavy chain, comprising a first variable heavy domain and a first constant heavy domain comprising a first Fc domain, with a first variable light domain covalently attached to the C-terminus of the first Fc domain using a domain linker (VH1-CH1-hinge-CH2-CH3-[optional linker]-VL2). The second monomer comprises: a second variable heavy domain, a second constant heavy domain comprising a second Fc domain, and a third variable heavy domain covalently attached to the C-terminus of the second Fc domain using a domain linker (VH1-CH1-hinge-CH2-CH3-[optional linker]-VH2). This embodiment further utilizes a common light chain comprising a variable light domain and a constant light domain, which associates with the heavy chains to form two identical Fabs that include two identical Fvs. The two C-terminally attached variable domains (VL2 and VH2) make up the “extra” third Fv.

[0473] As for many of the embodiments herein, these constructs can include one or more of: (i) Fc ADCC variants, (ii) pI variants, (iii) ablation variants, (iv) skew variants, (v) variants that improve serum half-life, as well as any combination thereof, as desired and described herein.

[0474] Any suitable NKG2D antigen binding domain (as described herein and in the Figures and sequence listing, or a variant thereof) can be included in the subject mAb-Fv format antibody.

[0475] Any suitable B7H3 binding domain (as described herein and in the Figures and sequence listing, or a variant thereof) can be included in the subject mAb-Fv format antibody.

[0476] 8. Dual scFv Format

[0477] One heterodimeric scaffold that finds particular use in the antibodies described herein is the “dual scFv” format, as shown in FIG. 2 of U.S. Pat. No. 10,793,632, hereby incorporated by reference in its entirety including the figures and legends.

[0478] In some embodiments, the format relies on the use of two scFv-Fc monomers (both in either the V_{H}-scFv linker-V_{L}-[optional domain linker]-CH2-CH3 format, the V_{L}-scFv linker-V_{H}-[optional domain linker]-CH2-CH3 format, or with one monomer in one orientation and the other monomer in the other orientation). In some instances, one of the scFv-Fc monomers binds NKG2D such as the ECD thereof and the other scFv-Fc monomers binds B7H3 such as the ECD thereof. In the format, both ABDs are in an scFv format. Any suitable NKG2D ABD and B7H3 ABD can be included in the subject bispecific antibodies in the dual scFv format, including any of the NKG2D ABDs and B7H3 ABDs described herein, in the Figures, and sequence listing, as well as variants thereof. In some embodiments, the first scFv or the second scFv is the domain that binds to NKG2D. In some embodiments, one Fc domain (CH2-CH3 of one monomer) or both Fc domains of these constructs can include one or more of: (i) FcγRIIIa variants, (ii) pI variants, (iii) skew variants, and (iv) FcRn variants, as well as any combination thereof, as desired and described herein. In certain embodiments, the Fc domains of the 1+1 Fab-scFv-Fc format contain FcγRIIIa variants, skew variants, pI variants, and optionally FcRn variants. In some embodiments, such Fc domains include asymmetric FcγRIIIa variants such that one Fc domain includes S239D/I332E substitutions, and the other Fc domain includes no FcγRIIIa variants, amino acid substitution(s) selected from the group including S239D, I332E, S239D/I332E, G236A, S239E, I332D, G236A/I332E, S239D/I332E/A330L, I332E/A330L, F243L, S298A, E333A, K334A, S298A/E333A, and S298A/E333A/K334A. In many embodiments, the Fc domains generally include skew variants (e.g., a set of amino acid substitutions as shown in FIG. 1, with particularly useful skew variants being selected from the group including: S364K/E357Q:L368D/K370S; L368D/K370S:S364K; L368E/K370S:S364K; T411E/K360E/Q362E:D401K; L368D/K370S:S364K/E357L; K370S:S364K/E357Q; T366S/L368A/Y407V:T366W and T366S/L368A/Y407V/Y349C:T366W/S354C), and optionally FcRn variants (including M428L/N434S or M428L/N434A), optionally charged scFv linkers (including those shown in FIG. 5), optionally ablation variants (including those shown in FIG. 3), and the heavy chain comprises pI variants (including those shown in FIG. 2).

[0479] Any suitable NKG2D ABD V_{H}/V_{L} pairs described herein (and in the Figures and sequence listing), or a variant thereof, can be included in the subject dual scFv format antibody. In some embodiments, the first scFv or the second scFv is the domain that binds to B7H3. Any suitable B7H3 ABD V_{H}/V_{L} pairs described herein (and in the Figures and sequence listing), or a variant thereof, can be included in the subject dual scFv format antibody.

[0480] 9. One-Armed scFv-mAb Format

[0481] One heterodimeric scaffold that finds particular use in the antibodies described herein is the “one-armed scFv-mAb” format, as shown in FIG. 2 of U.S. Pat. No. 10,793,632, hereby incorporated by reference in its entirety including the figures and legends. This format includes: 1) a first monomer that comprises an “empty” Fc domain; 2) a second monomer that includes a first variable heavy domain (V_{H}), a scFv domain (a second ABD), an Fc domain, where the scFv domain is attached to the N-terminus of the first variably heavy domain; and 3) a light chain that includes a first variable light domain and a constant light domain. The first variable heavy domain and the first variable light domain form a first antigen binding domain and the scFv is a second antigen binding domain. In some embodiments of the format, one of the first ABDs and the second ABDs binds NKG2D such as the ECD of NKG2D, and the other ABD binds B7H3 such as the ECD of NKG2D. In some embodiments, one or both Fc domains of these constructs can include one or more of: (i) FcγRIIIa variants, (ii) pI variants, (iii) skew variants, and (iv) FcRn variants, as well as any combination thereof, as desired and described herein. In certain embodiments, the Fc domains of the 1+1 Fab-scFv-Fc format contain FcγRIIIa variants, skew variants, pI variants, and optionally FcRn variants. In some embodiments, such Fc domains include asymmetric FcγRIIIa variants such that one Fc domain includes S239D/I332E substitutions, and the other Fc domain includes no FcγRIIIa variants, amino acid substitution(s) selected from the group including S239D, I332E, S239D/I332E, G236A, S239E, I332D, G236A/I332E, S239D/I332E/A330L, I332E/A330L, F243L, S298A, E333A, K334A, S298A/E333A, and S298A/E333A/K334A. In many embodiments, the Fc domains generally include skew variants (e.g., a set of amino acid substitutions as shown in FIG. 1, with particularly useful skew variants being selected from the group including: S364K/E357Q:L368D/K370S; L368D/K370S:S364K; L368E/K370S:S364K; T411E/K360E/Q362E:D401K; L368D/K370S:S364K/E357L; K370S:S364K/E357Q; T366S/L368A/Y407V:T366W and T366S/L368A/Y407V/Y349C:T366W/S354C), and optionally FcRn variants (including M428L/N434S or M428L/N434A), optionally charged scFv linkers (including those shown in FIG. 5), optionally ablation variants (including those shown in FIG. 3), and the heavy chain comprises pI variants (including those shown in FIG. 2).

[0482] Any suitable NKG2D antigen binding domain (as described herein and in the Figures and sequence listing) or a variant thereof can be included in the subject one-armed scFv-mAb format antibody.

[0483] Any suitable B7H3 antigen binding domain (as described herein and in Figures and sequence listing) or a variant thereof can be included in the subject one-armed scFv-mAb format antibody.

[0484] 10. One-Armed Central-scFv Format

[0485] One heterodimeric scaffold that finds particular use in the antibodies described herein is the “one-armed central-scFv” format, as shown in FIG. 2 of U.S. Pat. No. 10,793,632, hereby incorporated by reference in its entirety including the figures and legends. In the format, one monomer comprises solely an Fc domain (i.e., a first Fc domain), while the other monomer includes a Fab domain (a first ABD), a scFv (a second ABD), and an Fc domain (i.e., a second Fc domain), where the scFv domain is inserted between the first Fc domain and the second Fc domain. In this format, the Fab portion binds a first antigen and the scFv binds a second antigen. In other words, one monomer comprises a first heavy chain comprising a first variable heavy domain, a CH1 domain, and a Fc domain, with a scFv comprising a scFv variable light domain, an scFv linker, and a scFv variable heavy domain. The scFv is covalently attached between the C-terminus of the CH1 domain of the heavy constant domain and the N-terminus of the first Fc domain using domain linkers, in either orientation, VH1-CH1-[optional domain linker]-VH2-scFv linker-VL2-[optional domain linker]-CH2-CH3 or VH1-CH1-[optional domain linker]-VL2-scFv linker-VH2-[optional domain linker]-CH2-CH3. The second monomer comprises an Fc domain (CH2-CH3). The embodiment further utilizes a light chain comprising a variable light domain and a constant light domain that associates with the heavy chain to form a Fab. In some embodiments, the Fab portion binds B7H3 such as the ECD thereof and the scFv binds NKG2D such as the ECD thereof. In some embodiments, the Fab portion binds NKG2D such as the ECD thereof and the scFv binds B7H3 such as the ECD thereof.

[0486] In some embodiments, one or both Fc domains of these constructs can include one or more of: (i) FcγRIIIa variants, (ii) pI variants, (iii) skew variants, and (iv) FcRn variants, as well as any combination thereof, as desired and described herein. In certain embodiments, the Fc domains of the 1+1 Fab-scFv-Fc format contain FcγRIIIa variants, skew variants, pI variants, and optionally FcRn variants. In some embodiments, such Fc domains include asymmetric FcγRIIIa variants such that one Fc domain includes S239D/I332E substitutions, and the other Fc domain includes no FcγRIIIa variants, amino acid substitution(s) selected from the group including S239D, I332E, S239D/I332E, G236A, S239E, I332D, G236A/I332E, S239D/I332E/A330L, I332E/A330L, F243L, S298A, E333A, K334A, S298A/E333A, and S298A/E333A/K334A. In many embodiments, the Fc domains generally include skew variants (e.g., a set of amino acid substitutions as shown in FIG. 1, with particularly useful skew variants being selected from the group including: S364K/E357Q:L368D/K370S; L368D/K370S:S364K; L368E/K370S:S364K; T411E/K360E/Q362E:D401K; L368D/K370S:S364K/E357L; K370S:S364K/E357Q; T366S/L368A/Y407V:T366W and T366S/L368A/Y407V/Y349C:T366W/S354C), and optionally FcRn variants (including M428L/N434S or M428L/N434A), optionally charged scFv linkers (including those shown in FIG. 5), optionally ablation variants (including those shown in FIG. 3), and the heavy chain comprises pI variants (including those shown in FIG. 2).

[0487] Any suitable NKG2D antigen binding domain (as described herein and in the and sequence listing) or a variant thereof can be included in the subject one-armed central-scFv format antibody.

[0488] Any suitable B7H3 binding domain (as described herein and in the Figures and sequence listing) or a variant thereof can be included in the subject one-armed central-scFv format antibody.

[0489] 11. Central-Fv Format

[0490] One heterodimeric scaffold that finds particular use in the antibodies described herein is the “central-Fv” format, as shown in FIG. 2 of U.S. Pat. No. 10,793,632, hereby incorporated by reference in its entirety including the figures and legends. In one embodiment, the format relies on the use of an inserted Fv domain (i.e., the central Fv domain) thus forming an “extra” third ABD, wherein the Fab portions of the two monomers bind B7H3 and the “extra” central Fv domain binds NKG2D. The Fv domain is inserted between the Fc domain and the CH1-Fv region of the monomers, thus providing a third ABD, wherein each monomer contains a component of the Fv (e.g., one monomer comprises a variable heavy domain and the other comprises a variable light domain of the “extra” central Fv domain). In another embodiment, the format relies on the use of an inserted Fv domain (i.e., the central Fv domain) thus forming an “extra” third ABD, wherein the Fab portions of the two monomers bind NKG2D and the “extra” central Fv domain binds B7H3. The Fv domain is inserted between the Fc domain and the CH1-Fv region of the monomers, thus providing a third ABD, wherein each monomer contains a component of the Fv (e.g., one monomer comprises a variable heavy domain and the other comprises a variable light domain of the “extra” central Fv domain).

[0491] In this embodiment, one monomer comprises a first heavy chain comprising a first variable heavy domain, a CH1 domain, and Fc domain, and an additional variable light domain. The additional variable light domain is covalently attached between the C-terminus of the CH1 domain of the heavy constant domain and the N-terminus of the first Fc domain using domain linkers (VH1-CH1-[optional linker]-VL2-hinge-CH2-CH3). The other monomer comprises a first heavy chain comprising a first variable heavy domain, a CH1 domain and Fc domain, and an additional variable heavy domain (VH1-CH1-[optional linker]-VH2-hinge-CH2-CH3). The additional variable heavy domain is covalently attached between the C-terminus of the CH1 domain of the heavy constant domain and the N-terminus of the first Fc domain using domain linkers. In some embodiments, the format further utilizes a common light chain comprising a variable light domain and a constant light domain, that associates with the heavy chains to form two identical Fabs that each bind B7H3. The additional variable heavy domain and additional variable light domain form an “extra” central Fc that binds NKG2D. In other embodiments, the format further utilizes a common light chain comprising a variable light domain and a constant light domain, that associates with the heavy chains to form two identical Fabs that each bind NKG2D. The additional variable heavy domain and additional variable light domain form an “extra” central Fc that binds B7H3.

[0492] In some embodiments, one or both Fc domains of these constructs can include one or more of: (i) FcγRIIIa variants, (ii) pI variants, (iii) skew variants, and (iv) FcRn variants, as well as any combination thereof, as desired and described herein. In certain embodiments, the Fc domains of the 1+1 Fab-scFv-Fc format contain FcγRIIIa variants, skew variants, pI variants, and optionally FcRn variants. In some embodiments, such Fc domains include asymmetric FcγRIIIa variants such that one Fc domain includes S239D/I332E substitutions, and the other Fc domain includes no FcγRIIIa variants, amino acid substitution(s) selected from the group including S239D, I332E, S239D/I332E, G236A, S239E, I332D, G236A/I332E, S239D/I332E/A330L, I332E/A330L, F243L, S298A, E333A, K334A, S298A/E333A, and S298A/E333A/K334A. In many embodiments, the Fc domains generally include skew variants (e.g., a set of amino acid substitutions as shown in FIG. 1, with particularly useful skew variants being selected from the group consisting of S364K/E357Q:L368D/K370S; L368D/K370S:S364K; L368E/K370S:S364K; T411E/K360E/Q362E:D401K; L368D/K370S:S364K/E357L; K370S:S364K/E357Q; T366S/L368A/Y407V:T366W and T366S/L368A/Y407V/Y349C:T366W/S354C), and optionally FcRn variants (including M428L/N434S or M428L/N434A), optionally charged scFv linkers (including those shown in FIG. 5), optionally ablation variants (including those shown in FIG. 3), and the heavy chain comprises pI variants (including those shown in FIG. 2).

[0493] Any suitable NK cell antigen binding domain (as described herein and in the Figures and sequence listing) or a variant thereof can be included in the subject central-Fv format antibody.

[0494] Any suitable B7H3 antigen binding domain (as described herein and in the Figures and sequence listing) or a variant thereof can be included in the subject central-Fv format antibody.

[0495] 12. scFv-mAb Format

[0496] One heterodimeric scaffold that finds particular use in the antibodies described herein is the “scFv-mAb” format, as shown in FIG. 2 of U.S. Pat. No. 10,793,632, hereby incorporated by reference in its entirety including the figures and legends. In one embodiment, the format relies on the use of a N-terminal attachment of a scFv to one of the monomers, thus forming a third ABD, wherein the Fab portions of the two monomers bind B7H3 and the “extra” scFv domain binds NKG2D. In another embodiment, the format relies on the use of a N-terminal attachment of a scFv to one of the monomers, thus forming a third ABD, wherein the Fab portions of the two monomers bind NKG2D and the “extra” scFv domain binds B7H3.

[0497] In one embodiment, the first monomer comprises a first heavy chain (comprising a variable heavy domain and a constant domain), with a N-terminally covalently attached scFv comprising a scFv variable light domain, an scFv linker, and a scFv variable heavy domain in either orientation ((VH1-scFv linker-VL1-[optional domain linker]-VH2-CH1-hinge-CH2-CH3) or (with the scFv in the opposite orientation (VL1-scFv linker-VH1-[optional domain linker]-VH2-CH1-hinge-CH2-CH3))). This embodiment further utilizes a common light chain comprising a variable light domain and a constant light domain that associates with the heavy chains to form two identical Fabs that bind B7H3. As such, the scFv binds NKG2D.

[0498] In some embodiments, one or both Fc domains of these constructs can include one or more of: (i) FcγRIIIa variants, (ii) pI variants, (iii) skew variants, and (iv) FcRn variants, as well as any combination thereof, as desired and described herein. In certain embodiments, the Fc domains of the 1+1 Fab-scFv-Fc format contain FcγRIIIa variants, skew variants, pI variants, and optionally FcRn variants. In some embodiments, such Fc domains include asymmetric FcγRIIIa variants such that one Fc domain includes S239D/I332E substitutions, and the other Fc domain includes no FcγRIIIa variants, amino acid substitution(s) selected from the group including S239D, I332E, S239D/I332E, G236A, S239E, I332D, G236A/I332E, S239D/I332E/A330L, I332E/A330L, F243L, S298A, E333A, K334A, S298A/E333A, and S298A/E333A/K334A. In many embodiments, the Fc domains generally include skew variants (e.g., a set of amino acid substitutions as shown in FIG. 1, with particularly useful skew variants being selected from the group including: S364K/E357Q:L368D/K370S; L368D/K370S:S364K; L368E/K370S:S364K; T411E/K360E/Q362E:D401K; L368D/K370S:S364K/E357L; K370S:S364K/E357Q; T366S/L368A/Y407V:T366W and T366S/L368A/Y407V/Y349C:T366W/S354C), and optionally FcRn variants (including M428L/N434S or M428L/N434A), optionally charged scFv linkers (including those shown in FIG. 5), optionally ablation variants (including those shown in FIG. 3), and the heavy chain comprises pI variants (including those shown in FIG. 2).

[0499] Any suitable NKG2D antigen binding domain (as described herein and in the Figures and sequence listing) or a variant thereof can be included in the subject scFv-mAb format antibody.

[0500] Any suitable B7H3 antigen binding domain (as described herein and in the Figures and sequence listing) or a variant thereof can be included in the subject scFv-mAb format antibody.

[0501] 13. Non-Heterodimeric Bispecific Antibodies

[0502] As will be appreciated by those in the art, the anti-NKG2D×anti-B7H3 antibodies provided herein can also be included in non-heterodimeric bispecific formats, as shown in FIG. 2 of U.S. Pat. No. 10,793,632, hereby incorporated by reference in its entirety including the figures and legends. In this format, the anti-NKG2D×anti-B7H3 antibody includes: (i) a first monomer comprising a VH1-CH1-hinge-CH2-CH3, (ii) a second monomer comprising a VH2-CH1-hinge-CH2-CH3, (iii) a first light chain comprising a VL1-C_{L}, and (iv) a second light chain comprising a VL2-C_{L}. In such embodiments, the VH1 and VL1 form a first ABD, and VH2 and VL2 form a second ABD. In some embodiments, one of the first or second antigen binding domains binds B7H3 and the other antigen binding domain binds NKG2D. In certain embodiments, one of the first or second antigen binding domains binds NKG2D and the other antigen binding domain binds B7H3.

[0503] Any suitable NKG2D antigen binding domain (as described herein and in the Figures and sequence listing) or a variant thereof can be included in the subject non-heterodimeric bispecific format antibody.

[0504] Any suitable B7H3 antigen binding domain (as described herein and in the Figures and sequence listing) or a variant thereof can be included in the subject non-heterodimeric bispecific format antibody.

[0505] 14. Trident Format

[0506] One heterodimeric scaffold that finds particular use in the antibodies described herein is the “Trident” format, as shown in FIG. 2 of U.S. Pat. No. 10,793,632, hereby incorporated by reference in its entirety including the figures and legends. Such a “Trident” format is generally described in WO2015/184203, hereby expressly incorporated by reference in its entirety and in particular for the figures, legends, definitions, and sequences of “Heterodimer-Promoting Domains” or “HPDs”, including “K-coil” and “E-coil” sequences. Tridents rely on using two different HPDs that associate to form a heterodimeric structure as a component of the structure. In this embodiment, the Trident format includes a “traditional” heavy and light chain (e.g., VH1-CH1-hinge-CH2-CH3 and VL1-C_{L}), a third chain comprising a first “diabody-type binding domain” or “DART©,” VH2-(linker)-VL3-HPD1, and a fourth chain comprising a second DART®, VH3-(linker)-(linker)-VL2-HPD2. The VH1 and VL1 form a first ABD, the VH2 and VL2 form a second ABD, and the VH3 and VL3 form a third ABD. In some cases, the second and third ABDs bind the same antigen, in this instance generally a tumor target antigen (TTA) such as B7H3, e.g., bivalently, with the first ABD binding NKG2D (such as the ECD of NKG2D) monovalently.

[0507] Any suitable NKG2D antigen binding domain (as described herein and in the Figures and sequence listing) or a variant thereof can be included in the subject Trident format antibody.

[0508] Any suitable B7H3 antigen binding domain (as described herein and in the Figures and sequence listing) or a variant thereof can be included in the subject Trident format antibody.

[0509] 15. Monospecific Monoclonal Antibodies

[0510] As will be appreciated by those in the art, the novel NKG2D ABD sequences outlined herein can also be used in both monospecific antibodies (e.g., “traditional monoclonal antibodies”) or non-heterodimeric bispecific formats. Accordingly, in some embodiments, the antibodies described herein provide monoclonal (monospecific) antibodies comprising the 6 CDRs and/or the vh and vl sequences from the figures, generally with IgG1, IgG2, or IgG4 constant regions, with IgG1, IgG2 and IgG4 (including IgG4 constant regions comprising a S228P amino acid substitution) finding particular use in some embodiments. That is, any sequence herein with a “H_L” designation can be linked to the constant region of a human IgG1 antibody.

[0511] Any suitable NKG2D ABD can be included in the monospecific antibody, including any of the NKG2D ABDs described herein.

[0512] In other embodiments, the monospecific antibody is an NKG2D monospecific antibody that has a V_{H}/V_{L} pair selected from the group including: 1D7B4_H1_L1; 1D2B4_H0_L0; mAb-C_H0_L0; mAb-D_H0_L0; 1D7B4_L1_H1; 1D2B4_L0_H0; mAb-C_L0_H0; mAb-D_L0_H0; 1D7B4_H1.1_L1; 1D7B4_H1.2_L1; 1D7B4_H1.3_L1; 1D7B4_H1.4_L1; 1D7B4_H1.5_L1; 1D7B4_H1.6_L1; 1D7B4_H1.7_L1; 1D7B4_H1.8_L1; 1D7B4_H1.9_L1; 1D7B4_H1.10_L1; 1D7B4_H1.11_L1; 1D7B4_H1.12_L1; 1D7B4_H1.13_L1; 1D7B4_H1.14_L1; 1D7B4_H1.15_L1; 1D7B4_H1.16_L1; 1D7B4_H1.17_L1; 1D7B4_H1.18_L1; 1D7B4_H1.19_L1; 1D7B4_H1.20_L1; 1D7B4_H1.21_L1; 1D7B4_H1.22_L1; 1D7B4_H1.23_L1; 1D7B4_H1.24_L1; 1D7B4_H1.25_L1; 1D7B4_H1.26_L1; 1D7B4_H1.27_L1; 1D7B4_H1.28_L1; 1D7B4_H1.29_L1; 1D7B4_H1.30_L1; 1D7B4_H1.31_L1; 1D7B4_H1.32_L1; 1D7B4_H1.3_L13; 1D7B4_H1.34_L1; 1D7B4_H1.35_L1; 1D7B4_H1.36_L1; 1D7B4_H1.37_L1; 1D7B4_H1.38_L1; 1D7B4_H1.39_L1; 1D7B4_H1.40_L1; 1D7B4_H1.41_L1; 1D7B4_H1.42_L1; 1D7B4_H1.43_L1; 1D7B4_H1.44_L1; 1D7B4_H1.45_L1; 1D7B4_H1.46_L1; 1D7B4_H1.47_L1; 1D7B4_H1.48_L1; 1D7B4_L1_H1.1; 1D7B4_L1_H1.2; 1D7B4_L1_H1.3; 1D7B4_L1_H1.4; 1D7B4_L1_H1.5; 1D7B4_L1_H1.6; 1D7B4_L1_H1.7; 1D7B4_L1_H1.8; 1D7B4_L1_H1.9; 1D7B4_L1_H1.10; 1D7B4_L1_H1.11; 1D7B4_L1_H1.12; 1D7B4_L1_H1.13; 1D7B4_L1_H1.14; 1D7B4_L1_H1.15; 1D7B4_L1_H1.16; 1D7B4_L1_H1.17; 1D7B4_L1_H1.18; 1D7B4_L1_H1.19; 1D7B4_L1_H1.20; 1D7B4_L1_H1.21; 1D7B4_L1_H1.22; 1D7B4_L1_H1.23; 1D7B4_L1_H1.24; 1D7B4_L1_H1.25; 1D7B4_L1_H1.26; 1D7B4_L1_H1.27; 1D7B4_L1_H1.28; 1D7B4_L1_H1.29; 1D7B4_L1_H1.30; 1D7B4_L1_H1.31; 1D7B4_L1_H1.32; 1D7B4_L1_H1.33; 1D7B4_L1_H1.34; 1D7B4_L1_H1.35; 1D7B4_L1_H1.36; 1D7B4_L1_H1.37; 1D7B4_L1_H1.38; 1D7B4_L1_H1.39; 1D7B4_L1_H1.40; 1D7B4_L1_H1.41; 1D7B4_L1_H1.42; 1D7B4_L1_H1.43; 1D7B4_L1_H1.44; 1D7B4_L1_H1.45; 1D7B4_L1_H1.46; 1D7B4_L1_H1.47; 1D7B4_L1_H1.48; 1D2B4_H1_L1; 1D2B4_L1_H1; ADI27744_A44_H0_L0; ADI27744_A44_L0_H0; ADI27749_A49_H0_L0; ADI27749_A49_L0_H0; or variants thereof, as well as those depicted in FIGS. 19, 56, 58 and 59.

[0513] In some embodiments, the αNKG2D ABD V_{H}/V_{L} pairs are found in, for example, SEQ ID NOS:1020 and 3; SEQ ID NOS:1022 and 3; SEQ ID NOS:1023 and 1024; SEQ ID NOS:1025 and 1026; SEQ ID NOS:1211 and 51; SEQ ID NOS:1213 and 51; SEQ ID NOS:1215 and 51; SEQ ID NOS:1217 and 51; SEQ ID NOS:1219 and 51; SEQ ID NOS:1221 and 51; SEQ ID NOS:1223 and 51; SEQ ID NOS:1225 and 51; SEQ ID NOS:1227 and 51; SEQ ID NOS:1229 and 51; SEQ ID NOS:1231 and 51; SEQ ID NOS:1233 and 51; SEQ ID NOS:1235 and 51; SEQ ID NOS:1237 and 51; SEQ ID NOS:1239 and 51; SEQ ID NOS:1241 and 51; SEQ ID NOS:1243 and 51; SEQ ID NOS:1245 and 51; SEQ ID NOS:1247 and 51; SEQ ID NOS:1249 and 51; SEQ ID NOS:1251 and 51; SEQ ID NOS:1253 and 51; SEQ ID NOS:1255 and 51; SEQ ID NOS:1257 and 51; SEQ ID NOS:1259 and 51; SEQ ID NOS:1261 and 51; SEQ ID NOS:1263 and 51; SEQ ID NOS:1265 and 51; SEQ ID NOS:1267 and 51; SEQ ID NOS:1269 and 51; SEQ ID NOS:1271 and 51; SEQ ID NOS:1273 and 51; SEQ ID NOS:1275 and 51; SEQ ID NOS:1277 and 51; SEQ ID NOS:1279 and 51; SEQ ID NOS:1281 and 51; SEQ ID NOS:1283 and 51; SEQ ID NOS:1285 and 51; SEQ ID NOS:1287 and 51; SEQ ID NOS:1289 and 51; SEQ ID NOS:1291 and 51; SEQ ID NOS:1293 and 51; SEQ ID NOS:1295 and 51; SEQ ID NOS:1297 and 51; SEQ ID NOS:1299 and 51; SEQ ID NOS:1301 and 51; SEQ ID NOS:1303 and 51; and SEQ ID NOS:1305 and 51, or variants thereof, as well as those depicted in the FIGS. 56 and 58.

[0514] NKG2D antigen binding domain sequences or NKG2D ABD V_{H}/V_{L} pairs finding particular use in these embodiments include, but are not limited to, 1D2B4_H1_L1; 1D2B4_L1_H1; ADI27744_A44_H0_L0; ADI27744_A44_L0_H0; ADI27749_A49_H0_L0; ADI27749_A49_L0_H0; 1D7B4_H1_L1; 1D7B4_L1_H1; 1D7B4_H1.3_L1; 1D7B4_L1_H1.3; 1D7B4_H1.23_L1; 1D7B4_L1_H1.23; 1D7B4_H1.28_L1; 1D7B4_L1_H1.28; 1D7B4_H1.31_L1; 1D7B4_L1_H1.31; 1D7B4_H1.33_L1; 1D7B4_L1_H1.33, or a variant thereof. In certain embodiments, the αNKG2D ABD V_{H}/V_{L} pairs are selected from the group including: ADI27744_A44_H0_L0; ADI27749_A44_H0_L0; 1D7B4_H1.3_L1; 1D7B4_H1.23_L1; 1D7B4_H1.28_L1; 1D7B4_H1.31_L1; 1D7B4_H1.33_L1, as well as V_{H}/V_{L} sequence pairs provided in SEQ ID NOS:1308, 1310, 1312, 1314 and 1316. In particular embodiments, the NKG2D scFv is any one selected from the group including those in SEQ ID NOS:1308, 1310, 1312, 1314 and 1316.

### VII. Nucleic Acids

[0515] The disclosure further provides nucleic acid compositions encoding the anti-NKG2D antibodies provided herein, including, but not limited to, NKG2D×B7H3 bispecific antibodies and NKG2D monospecific antibodies.

[0516] As will be appreciated by those in the art, the nucleic acid compositions will depend on the format and scaffold of the heterodimeric protein. Thus, for example, when the format requires three amino acid sequences, such as for the 1+1 Fab-scFv-Fc format (e.g., a first amino acid monomer comprising an Fc domain and a scFv, a second amino acid monomer comprising a heavy chain and a light chain), three nucleic acid sequences can be incorporated into one or more expression vectors for expression. Similarly, some formats (e.g., dual scFv formats such as disclosed in FIG. FIG. 2 of U.S. Pat. No. 10,793,632) only two nucleic acids are needed; again, they can be put into one or two expression vectors.

[0517] As is known in the art, the nucleic acids encoding the components of the antibodies described herein can be incorporated into expression vectors as is known in the art, and depending on the host cells used to produce the heterodimeric antibodies described herein. Generally, the nucleic acids are operably linked to any number of regulatory elements (promoters, origin of replication, selectable markers, ribosomal binding sites, inducers, etc.). The expression vectors can be extra-chromosomal or integrating vectors.

[0518] The nucleic acids and/or expression vectors of the antibodies described herein are then transformed into any number of different types of host cells as is well known in the art, including mammalian, bacterial, yeast, insect and/or fungal cells, with mammalian cells (e.g., CHO cells), finding use in many embodiments.

[0519] In some embodiments, nucleic acids encoding each monomer and the optional nucleic acid encoding a light chain, as applicable depending on the format, are each contained within a single expression vector, generally under different or the same promoter controls. In embodiments of particular use in the antibodies described herein, each of these two or three nucleic acids are contained on a different expression vector. As shown herein and in U.S. Pat. No. 9,822,186, hereby incorporated by reference, different vector ratios can be used to drive heterodimer formation. That is, surprisingly, while the proteins comprise first monomer:second monomer:light chains (in the case of many of the embodiments herein that have three polypeptides comprising the heterodimeric antibody) in a 1:1:2 ratio, these are not the ratios that give the best results.

[0520] The heterodimeric antibodies described herein are made by culturing host cells comprising the expression vector(s) as is well known in the art. Once produced, traditional antibody purification steps are done, including an ion exchange chromatography step. As discussed herein, having the pIs of the two monomers differ by at least 0.5 can allow separation by ion exchange chromatography or isoelectric focusing, or other methods sensitive to isoelectric point. That is, the inclusion of pI substitutions that alter the isoelectric point (pI) of each monomer so that such that each monomer has a different pI, and the heterodimer also has a distinct pI, thus facilitating isoelectric purification of the “1+1 Fab-scFv-Fc” and “2+1” heterodimers (e.g., anionic exchange columns, cationic exchange columns). These substitutions also aid in the determination and monitoring of any contaminating dual scFv-Fc and mAb homodimers post-purification (e.g., IEF gels, cIEF, and analytical IEX columns).

### VIII. Biological and Biochemical Functionality of the Heterodimeric Bispecific Antibodies

[0521] Generally, the bispecific NKG2D×B7H3 antibodies described herein are administered to patients with cancer, and efficacy is assessed, in a number of ways as described herein. Thus, while standard assays of efficacy can be run, such as cancer load, size of tumor, evaluation of presence or extent of metastasis, etc., immuno-oncology treatments can be assessed on the basis of immune status evaluations as well. This can be done in a number of ways, including both in vitro and in vivo assays.

### IX. Treatments

[0522] Once made, the compositions of the invention find use in a number of oncology applications, by treating cancer, generally by enhancing immune responses, including, activating NK cells, enhancing NK cell mediated lysis of tumor cells and providing co-stimulation to T cells in the tumor environment. Such compositions can be combined with proinflammatory cytokines for increased cytotoxicity against tumor cells.

[0523] A. Combination with Cytokine of Other Therapies

[0524] In some embodiments, a bispecific anti-B7H3×anti-NKG2D antibody described herein can be used in combination with a cytokine therapy. In some embodiments, a cytokine therapy includes, but is not limited, to an IL-15 therapy, an IL-12 therapy or a combination thereof.

[0525] Non-limiting examples of an IL-15 therapy include administration to a subject an IL-15 protein or a fragment thereof, an IL-15 variant protein or a fragment thereof, an IL-15 fusion protein, and an IL-15 agonist. Useful IL-15 fusion proteins include, but are not limited to those shown in FIGS. 22A-22B, such as XENP24045 and XENP24306. Sequences of exemplary IL-15 fusion proteins are provided in the sequence listing such as for SEQ ID NOS:164-165 and SEQ ID NOS:1077-1078.

[0526] IL-15 agonists are well-known in the art. Non-limiting examples of IL-15 agonists include PF-07209960 (Pfizer), KD033 (Kadmon), SOT201/SO-C108 (SOTIO/Cytune), SOT101/SO C101/RLI-15 (SOTIO/Cytune), XmAb24306 (Genentech/Xencor), NKTR-255 (Nektar), ALT-803/N-803/Anktiva (Altor Bioscience), and NIZ985 (Novartis). In some embodiments, the IL-15 agonist is an IL-15 protein. The wild-type human IL-15 protein comprises the amino acid sequence shown in FIG. 22C. In some embodiments, the IL-15 agonist is an IL-15 variant protein. IL-15 variant proteins are well-known in the art. See, e.g., U.S. Pat. Nos. 5,552,303; 5,574,138; 6,001,973; 6,013,480; 6,548,065; 6,764,836; 6,998,476; 7,858,081; 8,163,879; 8,178,660; 8,415,456; 8,507,222; 8,940,288; 9,303,080; 9,365,630; 9,371,368; 9,428,563; 9,428,573; 9,493,533; 9,725,492; 9,790,261; 9,932,387; and 9,975,937; U.S. Publication Nos. 2004/009149, 2006/0057680, 2006/0236411, 2006/0257361, 2007/0106066, 2007/0134718, 2009/0105455, 2009/0238791, 2015/0359853, 2016/0130318, 2016/0175459, 2016/0184399, 2016/0275236, 2017/0020963, 2017/0202924, 2017/0246253, 2018/0044424, 2018/0126003, and 2018/0200366; and PCT Publication Nos. WO9527722, WO2016095642, WO2017081082, WO2017046200, WO2017136818, WO2018013855 WO2018023093, WO2018071918, and WO2018071919, each of which is incorporated herein by reference in its entirety. Sequences of human IL-15 proteins, such as the precursor protein and the mature protein are set for in FIG. 22C as SEQ ID NOS:1079 and 1080, respectively and in the sequence listing.

[0527] Non-limiting examples of an IL-12 therapy include administration to a subject an IL-12 protein or a fragment thereof, an IL-12 variant protein or a fragment thereof, an IL-12 fusion protein, and an IL-12 agonist. Useful IL-12 fusion proteins include, but are not limited to those shown in FIGS. 22A-22B, such as XENP27201 and XENP39662. Sequences of exemplary IL-12 fusion proteins are provided in the sequence listing such as for SEQ ID NOS:166-167 and SEQ ID NOS:168-169. Other IL-12 fusion proteins include DF6002 (BMS-946415) and those described in PCT Publication No. WO2020086758, which is incorporated herein by reference in its entirety.

[0528] IL-12 agonists are also well-known in the art. In some embodiments, the IL-12 agonist is an IL-12 protein. The wild-type IL-12p35 and IL-12p40 subunits comprise the amino acid sequences shown in FIG. 22E. Sequences of human IL-12 proteins, such as the IL-12p35 precursor and mature proteins and the IL-12p40 precursor and mature proteins are set for in FIG. 22E as SEQ ID NOS:1088-1091 and in the sequence listing.

[0529] In some embodiments, a bispecific anti-B7H3×anti-NKG2D antibody described herein can be used in combination with a bispecific T-cell engager antibody that binds to the ECDs of B7H3 and CD3 or an antigen binding fragment thereof to the subject. In some embodiments, a useful bispecific T-cell engager antibody can be any one described in Ma et al., Invest New Drugs, 2019 October, 37(5):1036-1043 and PCT Publication Nos. WO2021/027674 and WO2017/030926, which are herein incorporated by reference in their entireties.

[0530] In some instances, administered “in combination”, as used herein, means that two (or more) different treatments are delivered to the subject during the course of the subject's affliction with the disorder, e.g., the two or more treatments are delivered after the subject has been diagnosed with the disorder and before the disorder has been cured or eliminated or treatment has ceased for other reasons. In some embodiments, the delivery of one treatment is still occurring when the delivery of the second begins, so that there is overlap in terms of administration. This is sometimes referred to herein as “simultaneous” or “concurrent delivery”. In other embodiments, the delivery of one treatment ends before the delivery of the other treatment begins. In some embodiments of either case, the treatment is more effective because of combined administration. For example, the second treatment is more effective, e.g., an equivalent effect is seen with less of the second treatment, or the second treatment reduces symptoms to a greater extent, than would be seen if the second treatment were administered in the absence of the first treatment, or the analogous situation is seen with the first treatment. In some embodiments, delivery is such that the reduction in a symptom, or other parameter related to the disorder is greater than what would be observed with one treatment delivered in the absence of the other. The effect of the two treatments can be partially additive, wholly additive, or greater than additive. The delivery can be such that an effect of the first treatment delivered is still detectable when the second is delivered.

[0531] B. Antibody Compositions for In Vivo Administration

[0532] Formulations of the antibodies used in accordance with the antibodies described herein are prepared for storage by mixing an antibody having the desired degree of purity with optional pharmaceutically acceptable carriers, excipients, or stabilizers (Remington's Pharmaceutical Sciences 16th edition, Osol, A. Ed. [1980]), in the form of lyophilized formulations or aqueous solutions.

[0533] C. Administration Modalities

[0534] The antibodies provided herein administered to a subject, in accord with known methods, such as intravenous administration as a bolus or by continuous infusion over a period of time.

[0535] D. Treatment Modalities

[0536] In the methods described herein, therapy is used to provide a positive therapeutic response with respect to a disease or condition. By “positive therapeutic response” is intended an improvement in the disease or condition, and/or an improvement in the symptoms associated with the disease or condition. For example, a positive therapeutic response would refer to one or more of the following improvements in the disease: (1) a reduction in the number of neoplastic cells; (2) an increase in neoplastic cell death; (3) inhibition of neoplastic cell survival; (5) inhibition (i.e., slowing to some extent, preferably halting) of tumor growth; (6) an increased patient survival rate; and (7) some relief from one or more symptoms associated with the disease or condition.

[0537] Positive therapeutic responses in any given disease or condition can be determined by standardized response criteria specific to that disease or condition. Tumor response can be assessed for changes in tumor morphology (i.e., overall tumor burden, tumor size, and the like) using screening techniques such as magnetic resonance imaging (MM) scan, x-radiographic imaging, computed tomographic (CT) scan, bone scan imaging, endoscopy, and tumor biopsy sampling including bone marrow aspiration (BMA) and counting of tumor cells in the circulation.

[0538] In addition to these positive therapeutic responses, the subject undergoing therapy may experience the beneficial effect of an improvement in the symptoms associated with the disease.

[0539] Treatment according to the disclosure includes a “therapeutically effective amount” of the medicaments used. A “therapeutically effective amount” refers to an amount effective, at dosages and for periods of time necessary, to achieve a desired therapeutic result.

[0540] A therapeutically effective amount may vary according to factors such as the disease state, age, sex, and weight of the individual, and the ability of the medicaments to elicit a desired response in the individual. A therapeutically effective amount is also one in which any toxic or detrimental effects of the antibody or antibody portion are outweighed by the therapeutically beneficial effects.

[0541] A “therapeutically effective amount” for cancer therapy may also be measured by its ability to stabilize the progression of disease. The ability of a compound to inhibit cancer may be evaluated in an animal model system predictive of efficacy in human tumors.

[0542] Alternatively, this property of a composition may be evaluated by examining the ability of the compound to inhibit cell growth or to induce apoptosis by in vitro assays known to the skilled practitioner. A therapeutically effective amount of a therapeutic compound may decrease tumor size, or otherwise ameliorate symptoms in a subject. One of ordinary skill in the art would be able to determine such amounts based on such factors as the subject's size, the severity of the subject's symptoms, and the particular composition or route of administration selected.

[0543] Dosage regimens are adjusted to provide the optimum desired response (e.g., a therapeutic response). For example, a single bolus may be administered, several divided doses may be administered over time, or the dose may be proportionally reduced or increased as indicated by the exigencies of the therapeutic situation. Parenteral compositions may be formulated in dosage unit form for ease of administration and uniformity of dosage. Dosage unit form as used herein refers to physically discrete units suited as unitary dosages for the subjects to be treated; each unit contains a predetermined quantity of active compound calculated to produce the desired therapeutic effect in association with the required pharmaceutical carrier.

[0544] The specifications for the dosage unit forms of the disclosure are dictated by and directly dependent on (a) the unique characteristics of the active compound and the particular therapeutic effect to be achieved, and (b) the limitations inherent in the art of compounding such an active compound for the treatment of sensitivity in individuals.

[0545] The efficient dosages and the dosage regimens for the bispecific antibodies described herein depend on the disease or condition to be treated and may be determined by the persons skilled in the art.

### IX. Other Embodiments

[0546] Provided herein are sequences of exemplary embodiments of the NKG2D×B7H3 bispecific antibodies described herein as well as useful antibodies for use as controls.

[0547] In some embodiments, a NKG2D binding domain V_{H}/V_{L} pair or a B7H3 binding domain V_{H}/V_{L} is shown in the sequence listing as, for example, SEQ ID NOS: 1318-1319; 1356-1358; 1359-1361; 1414-1416; 1417-1419; 1420-1422; 1423-1425; 1426-1428; 1429-1431; 1451-1453; 1454-1453; 1457-1459; 1460-1462; 1463-1465; 1466-1468; 1469-1471; 1472-1474; 1475-1477; 1475-1480; 1481-1483; 1489-1488; 1489-1491; 1492-1494; 1507-1509; 1510-1512; 1513-1515; 1516-1518; 1519-1521; 1522-1524; 1525-1527; 1528-1530; 1531-1533; 1534-1536; 1537-1539; 1540-1542; 1543-1545; 1546-1548; 1549-1551; 1552-1554; 1555-1557; 1558-1560; 1561-1563; 1564-1566; 1567-1569; 1570-1572; 1573-1575; 1576-1578; 1579-1581; 1582-1584; 0585-1587; 1588-1590; 1591-1593; 1594-1596; 1597-1599; 1600-1602; 1603-1605; 1606-1608; 1609-1611; 1612-1614; 1615-1617; 1618-1620; 1621-1623; 1624-1626; 1627-1629; 1630-1632; 1633-1635; 1636-1638; 1639-1641; 1642-1644; 1645-1647; 1648-1650; 1651-1653; 1654-1656; 1657-1659; 1660-1662; 1663-1665; 1666-1671; 1672-1674; 1675-1677; 1678-1680; 1681-1683; 1684-1686; 1687-1689; 1690-1692; 1693-1695; 1696-1698; 1699-1701; 1702-1704; 1705-1707; 1708-1710; 1711-1713; 1714-1716; 1717-1719; 1720-1722; 1723-1725; 1726-1728; 1729-1731; 1732-1734; 1732-1734; 1735-1737; 1738-1740; 1741-1743; 1744-1746; 1747-1749; 1750-1752; 1753-1755; 1756-1758; 1759-1761; 1762-1764; 1765-1767; 1768-1770; 1771-1773; 1774-1776; 1777-1779; 1780-1782; 1783-1785; 1786-1788; 1789-1791; 1800-1802; 1803-1805; 1806-1808; 1809-1811; 1812-1814; 1815-1817; 1818-1820; 1821-1823; 1824-1826; 1827-1829; 1830-1832; 1833-1835; 1836-1838; 1839-1841; 1842-1844; 1845-1847; 1848-1850; 1851-1853; 1854-1856; 1857-1859; 1860-1862; 1863-1865; 1866-1868; 1869-1871; 1872-1874; 1875-1877; 1878-1880; 1881-1883; 1884-1886; 1887-1889; 1890-1892; 1893-1895; 1995-1997; 1998-2000; 2001-2003; 2004-2006; 2007-2009; 2010-2012; 2013-2015; 2016-2018; 2019-2021; 2022-2024; 2025-2027; 2028-2230; 2031-2033; 2034-2036; 2037-2039; 2040-2043; 2043-2045; 2046-2048; 2049-2051; 2052-2054; 2055-2057; 2058-2060; 2061-2063; 2064-2066; 2067-2069; 2070-2072; 2073-2075; 2076-2078; 2079-2081; 2082-2084; 2085-2087; 2088-2090; 2091-2093; 2094-2096; 2097-2099; 2100-2102; 2103-2105; 2106-2108; 2109-2111; 2112-2114; 2115-2117; 2118-2120; 2121-2123; 2124-2126; 2127-2129; 2130-2132; 2133-2135; 2136-2138; 2139-2141; 2142-2144; 2145-2147; 2148-2150; 2151-2153; 2154-2156; 2157-2159; 2160-2162; 2163-2165; 2166-2168; 2169-2171; 2172-2174; 2175-2177; 2178-2180; 2182-2183; 2184-2186; 2187-2189; 2190-2192; 2193-2195; 2196-2198; 2299-2201; 2202-2204; 2205-2207; 2208-2210; 2211-2213; 2214-2216; 2217-2219; 2220-2222; 2223-2225; 2226-2228; 2229-2231; 2232-2234; 2235-2237; 2238-2240; 2241-2243; 2244-2246; 2247-2249; 2250-2252; 2253-2255; 2256-2258; 2259-2261; 2262-226; 2265-2267; 2268-2270; 2271-2273; 2274-2276; 2277-2279; 2280-2282; 2283-2285; 2286-2288; 2289-2291; 2292-2294; 2295-2297; 2298-2300; 2301-2303; 2304-2306; 2307-2309; 2310-2312; 2313-2315; 2316-2318; 2319-2321; 2322-2324; 2325-2537; 2327-2330; 2331-2333; 2334-2336; 2337-2339; 2340-2342; 2343-2346; 2349-2351; 2352-2354; 2355-2357; 2358-2360; 2361-2363; 2364-2366; 2367-2369; 2370-2372; 2373-2375; 2376-2378; 2379-2381; 2382-2384; 2385-2387; 2388-2390; 2391-2393; 2394-2396; 2397-2399; 2400-2402; 2403-2405; 2406-2408; 2409-2411; 2412-2413; 2415-2417; 2418-2420; 2421-2423; 2424-2426; 2427-2429; 2430-2432; 2433-2435; 2439-2441; 2442-2444; 2447-2449; 2450-2452; 2453-2455; 2453-2458; 2459-2461-2462-2464; and 2465-2467. In some embodiments, the NKG2D ABD of the subject antibody includes a V_{H} that is at least 90, 95, 97, 98 or 99% identical to a V_{H} domain in the sequence listing and a V_{L} that is at least 90, 95, 97, 98 or 99% identical to the V_{L} domain in the sequence listing. In some embodiments, the B7H3 ABD of the subject antibody includes a V_{H} that is at least 90, 95, 97, 98 or 99% identical to a V_{H} domain in the sequence listing and a V_{L} that is at least 90, 95, 97, 98 or 99% identical to the V_{L} domain in the sequence listing. Any NKG2D ABDs and B7H3 ABDs described in U.S. Provisional Patent Application No. 63/278,999 which is hereby incorporated by reference in its entirety such as the figures, figure legends, and sequences provided therein, can be used in the heterodimeric antibodies described herein.

[0548] In some embodiments, a NKG2D binding domain V_{H}/V_{L} pair that is useful for an scFv or Fab portion of any bispecific antibodies described is shown in the sequence listing as, for example, SEQ ID NOS: 2468-2469, 2470-2471, 2472-2473, 2474 and 2478, 2479-2480, 2481-2482, 2483-2484, 2485-2486, 2487-2488, 2489-2490, 2491-2492, 2493-2494, 2495-2496, 2497-2498, 2499-2500, 2501-2502, 2503-2504, 2505-2506, 2507-2508, 2509-2510, 2511-2512, 2513-2514, 2515-2516, 2517-2518, 2519-2520, 2521-2522, 2523-2524, 2525-2526, 2527-2528, 2529-2530, 2531-2532, 2533-2534, 2535-2536, 2537-2538, 2539-2540, 2541-2542, 2543-2544, 2545-2546, 2547-2548, 2549-2550, 2553-2554, 2555-2556, 2557-2558, 2559-2560, 2561-2562, 2563-2564, 2565-2566, 2567-2568, 2569-2570, 2571-2572, 2573-2574, 2589-2590, 2591-2592, 2593-2594, 2595-2596, 2597-2598, 2599-2600, 2601-2602, 2575 and 2576; 2577 and 2576, 2577 and 2578, 2579 and 2582, 2579 and 2583, 2579 and 2584, 2580 and 2582, 2580 and 2583, 2580 and 2584, 2581 and 2582, 2581 and 2583, 2581 and 2584, 2585 and 2587, 2585 and 2588, 2586 and 2587, 2586 and 2588, as well as 5C5, 13C6, 001, 013, 014, 018, 230, 296, 320, 395, P1A34972, P1AE4973, P1A34975, P1AE4977, P1AE4978, P1AE4979, P1AE4980, P1AE4981, ADI-27705, ADI-27724, ADI-27740, ADI-27741, ADI-27743, ADI-28153, ADI-28226, ADI-28154, ADI-29399, ADI-29401, ADI-29403, ADI-29405, ADI-29407, ADI-29419, ADI-29421, ADI-29424, ADI-29425, ADI-29426, ADI-29429, ADI-29447, ADI-29404, ADI-28200, mAb E, MS, 21F2, MS, 21F2, 16F31, KYK-2.0, 1D7B4, KYK-1.0, 11B2D10, 6E5A7, 6H7E7, mAb D, ADI-27727, ADI-27729, ADI-27749, ADI-27744, ADI-27743, ADI-27378, ADI-27379, ADI-29463, mAb A_H1_L1, mAb A_H1_L2, mAb A_H2_L1, mAb A_H2_L2, mAb B_H1_L1, mAb B_H1_L1.1, mAb B_H1_L2, mAb B_H2_L, mAb B_H2_L1.1, mAb B_H2_L2, mAb B_H3_L1, mAb B_H3_L1.1, mAb B_H3_L2, mAb C_H1_L1, mAb C_H1_L2, mAb C_H2_L1, and mAb C_H2_L2.

[0549] All cited references are herein expressly incorporated by reference in their entirety.

[0550] Whereas particular embodiments of the disclosure have been described above for purposes of illustration, it will be appreciated by those skilled in the art that numerous variations of the details may be made without departing from the invention as described in the appended claims.

### EXAMPLES

[0551] The following examples are presented in order to more fully illustrate some embodiments of the invention. They should, in no way be construed, however, as limiting the broad scope of the invention. One skilled in the art can readily devise many variations and modifications of the principles disclosed herein without departing from the scope of the invention.

### Example 1: NKG2D Binding Domains

[0552] Several NKG2D antibody binding domains (ABDs) that may find use in the invention were discovered by phage display library screening as previously described in U.S. patent application Ser. No. 16/724,118, hereby incorporated by reference. Recombinant human NKG2D (XENP25379; sequences depicted in FIG. 11) and cynomolgus NKG2D (XENP25380; sequences depicted in FIG. 11) were generated in-house for phage panning. In-house de novo phage libraries were built displaying Fab and scFv variants (respectively referred to hereon as “Fab library” and “scFv library”) on phage coat protein pIII. Both the Fab library and the scFv library were panned in five rounds as follows: 1) human NKG2D, 2) cynomolgus NKG2D, 3) human NKG2D, 4) cynomolgus NKG2D, and 5) human NKG2D with increasing levels of stringency (both in terms of antigen concentration as well as wash stringency). The binding of the phage clones to NKG2D was then analyzed by ELISA. 1D7B4 and 1D2B4 were two of the NKG2D binding clones produced from this phage display campaign. Variable heavy and variable light chain sequences for 1D7B4 and 1D2B4 are depicted in FIG. 23. KD values and sensorgrams for 1D7B4 and 1D2B4 in the format of a bispecific antibody binding to human NKG2D or cynomolgus NKG2D are depicted in FIG. 32. Additional NKG2D ABDs disclosed in U.S. patent application Ser. No. 16/724,118 may also find use in the invention, including mAb C and mAb D. The sequence of the variable heavy and variable light chains for mAb C and mAb D may be found in FIG. 23. mAb C and mAb D do not compete for the same NKG2D epitope as 1D7B4 nor 1D2B4, but do compete with one another (data not shown), and therefore may have unique advantages.

### Example 2: B7113 Binding Domains

[0553] The B7H3 binding domains used herein, and methods of their discovery have been previously described in U.S. patent application Ser. No. 17/407,135, hereby incorporated by reference. B7H3 binding domains designated 38E2 and 6A1 of the B7H3 binding domains utilized herein were obtained from rabbit hybridoma and humanized using string content optimization (see, e.g., U.S. Pat. No. 7,657,380, issued Feb. 2, 2010). The variable heavy and variable light amino acid sequences for exemplary humanized rat hybridoma-derived 38E2 and 6A1 are depicted respectively in FIG. 13.

[0554] An additional B7H3 binding domain, 2E4A3.189, was discovered as previously described in U.S. patent application Ser. No. 17/407,135 through a phage display campaign. It then underwent affinity maturation, with substitutions engineered into the V_{H} only. This effort resulted in clone 2E4A3.189_H1.22. Sequences for 2E4A3.189_H1_L1, and affinity matured 2E4A3.189 H1.22, as well as XENP38571, an exemplary bivalent antibody comprising the 2E4A3.189_H1.22_L1 binding domain, are depicted in FIG. 14.

### Example 3: Engineering B7H3×NKG2D NK Cell Engagers

[0555] A number of formats for B7H3×NKG2D bsAbs were conceived, illustrative formats for which are outlined below and depicted in FIG. 15.

[0556] 3A: 1+1 Fab-scFv-Fc Format

[0557] One format utilizing a Fab domain and an scFv is the 1+1 Fab-scFv-Fc format (depicted schematically in FIG. 15A) which comprises a first monomer comprising a single-chain Fv (“scFv”) with a first antigen binding specificity covalently attached to a first heterodimeric Fc domain, a second monomer comprising a heavy chain variable region (V_{H}) covalently attached to a complementary second heterodimeric Fc domain, and a light chain (LC) transfected separately so that a Fab domain having a second antigen binding specificity is formed with the variable heavy domain. Sequences for illustrative αB7H3×αNKG2D bsAbs (based on binding domains as described in Examples 1 and 2) in the 1+1 Fab-scFv-Fc format are depicted in FIG. 19.

[0558] 3B: 2+1 Fab2-scFv-Fc Format

[0559] Another such format is the 2+1 Fab2-scFv-Fc format (depicted schematically in FIG. 15B) which comprises a first monomer comprising a V_{H} domain covalently attached to an scFv (having a first antigen binding specificity) covalently attached to a first heterodimeric Fc domain, a second monomer comprising a V_{H} domain covalently attached to a complementary second heterodimeric Fc domain, and a LC transfected separately so that Fab domains having a second antigen binding specificity are formed with the V_{H} domains. Sequences for illustrative αB7H3×αNKG2D bsAbs (based on binding domains as described in Examples 1 and 2) in the 2+1 Fab2-scFv-Fc format are depicted in FIG. 20.

[0560] 3C: 2+1 mAb-scFv Format

[0561] An additional format utilizing Fab domains and scFv is the 2+1 mAb-scFv format (depicted schematically in FIG. 15-C) which comprises a first monomer comprising a V_{H} domain covalently attached to a first heterodimeric Fc domain covalently attached to an scFv (having a first antigen binding specificity), a second monomer comprising a V_{H} domain covalently attached to a complementary second heterodimeric Fc domain, and a LC transfected separately so that Fab domains having a second antigen specificity are formed with the V_{H} domains. Sequences for illustrative αB7H3×αNKG2D bsAbs (based on binding domains as described in Examples 1 and 2) in the 2+1 mAb-scFv format are depicted in FIG. 21.

### Example 4: Fc Effector Function Engineering

### Example 4A: Fc Effector Function Engineering Enhances NK Cell Activation

[0562] Since NK cells rely on multiple signaling events for full activation, NKEs were designed for synergistic simultaneous engagement of FcγRIIIa (also known as CD16) and NKG2D. In order to determine the effect of Fc engagement with CD16 on the ability of B7H3×NKG2D bsAbs to activate NK cells, an activation assay was performed comparing NKG2D×B7H3 bsAbs with varying Fc domains. Test articles XENP38597, XENP38108, and XENP38101 were all produced in the 1+1 Fab-scFv-Fc format, each having a 1D7B4 NKG2D binding domain and a 2E4A3.189 B7H3 binding domain. In regard to the Fc domain, XENP38101 has an Fc comprising ablation variant S267K (numbering according to Kabat), which ablates FcγR binding. Ablation variants, also known as Fc knock-out or “FcKO” variants, are depicted in FIG. 3. XENP38597 has an Fc domain comprising substitutions S239D/I332E (numbering according to Kabat) that increase binding to FcγRIIIa. These S239D/I332E substitutions in an Fc monomeric domain may also be referred to herein as a “V90” variant or an ADCC enhancing Fc variant. The amino acid sequence for an exemplary antibody backbone comprising the V90 variant (S239D/I332E substitutions) is depicted in FIG. 18. Lastly, XENP38108 comprises an Fc domain containing neither ablation variants nor V90 variants. Sequences for XENP38597, XENP38108, and XENP38101 are depicted in FIG. 19.

[0563] In this assay, PBMCs were mixed with MCF7 cancer cells at a 40:1 ratio, which corresponds to approximately a 1:1 NK cell to MCF7 ratio. Cells were then treated with the one of the three XENPs described above at a range of concentrations as indicated in FIG. 24, and incubated for 4 hours. NK cell activation was then measured by degranulation marker CD107a and activation marker CD69 using flow cytometry. As seen in FIG. 24, XENP38101, having the FcKO ablation variants, was not able to activate NK cells. Meanwhile XENP38108, having a WT Fc domain in respect to FcR binding, was able to moderately activate NK cells, and XENP38597, having the V90 Fc variants allowing for enhanced binding to CD16a, were able to activate NK cells at a significantly higher level.

### Example 4B: Further Tuning of the Fc Effector Function

[0564] Inclusion of the ADCC enhancing S239D/I332E (V90) Fc variants in antibody constructs can result in decreased stability and a lower yield. To address this, an experimental set of B7H3 antibodies in the 1+1 Fab-scFv-Fc format (sequences for which are depicted in FIG. 55) were designed and produced with Fc regions having different combinations of S239D and/or I332E substitutions on either one or both Fc monomers, either symmetrically or asymmetrically. B7H3 was used as the ABD in both the Fab and the scFv arm for these test articles so that the binding and activity assays would be solely assessing CD16 engagement. FIGS. 51-52 depict the sequences of the various symmetric & asymmetric ADCC-enhanced backbone sequences, both without and with the addition of the Xtend M428L/N434S variants. In order to investigate the ADCC activity, MCF7 cells were seeded in a 96 well plate and incubated overnight. The next day, the ADCC Reporter Bioassay kit from Promega (Catalog #G7018) was used according to the manufacturer's protocol. Test articles and effector cells were added to the MCF7 cells, and after a 6 hour incubation, Bio-Glo luciferase reagent was added and plates were analyzed with an EnVision plate reader. This revealed a ladder of ADCC activity depicted numerically in FIG. 40 and graphically in FIG. 41. As demonstrated by the values in FIG. 40, this Fc engineering was successful in improving both the production yields and the stability as measured by the melting temperature (Tm). In general, the more similar the Fc region is to the wild-type IgG1 Fc at positions 239 and 332 the better the stability, but the lower the affinity for CD16 and the lower the ADCC and target cell killing activity. However, test articles with only the S239D mutations, such as XENP41023, have significant higher stability as compared to V90 and also provide a slightly higher affinity for CD16 as compared to XENP41024 which only has the I332E mutation. Additionally, S239D imposes a smaller decrease in stability and production than does the I332E mutation. The range of properties and affinities conferred by the different symmetric and asymmetric Fc variants disclosed may each provide unique advantages in certain contexts.

### Example 5: NKEs Augment Activation of NK Cells

[0565] After establishing the key role that Fc engagement of FcγRIIIa plays in NK cell activation, additional 1+1 Fab-scFv-Fc format constructs were produced, all comprising the V90 substitutions but with varying NKG2D binding domains. In an assay, PBMCs were co-cultured with MCF7 cancer cells at a 40:1 ratio, which corresponds to approximately a 1:1 NK cell to MCF7 ratio, and then cells were treated with test articles including XENP38597, having the 1D7B4 binding domain and XENP38596, having the 1D2B4 binding domain, alongside other comparator molecules and controls. After a 4-hour incubation, flow cytometry was used to measure degranulation marker CD107a. The results seen in FIG. 25 showed 1D7B4 and 1D2B4 to be two of the most active NK engagers. Control test articles such as XENP38575 (sequences depicted in FIG. 26), having a B7H3 binding domain but no NKG2D binding domain, resulted in decreased NK cell activation compared to NKG2D×B7H3 bsAbs.

### Example 6: NKEs Enhance NK Cell Mediated Cytotoxicity

[0566] In order to assess the ability of NKEs to kill target cells, an experiment was performed in which resting NK cells were co-cultured with MCF7-RFP tumor cells at an E:T ratio of 5:1. Treatments of either XENP40371 or XENP40377 were added at a concentration of 4.6 ng/ml. The growth of the MCF7 tumor cells was assessed over time using Incucyte. As depicted in FIG. 27, XENP40371, having a B7H3 binding domain but no NKG2D binding domain, has the ability to kill some percentage of target cells. However, XENP40377, having both the 1D7B4 NKG2D binding domain and the 38E2 B7H3 binding domain, showed a significantly improved ability to kill target cells compared with XENP40371. The sequence for XENP40371 is depicted in FIG. 26 and the sequence for XENP40377 is depicted in FIG. 19.

### Example 7: MHC Downregulation Increases Target Cells Sensitivity to NKE Driven Cell Lysis

[0567] As mentioned previously, one potential benefit of NKE cancer therapies over existing T cell engager cancer therapies is the ability of NKEs to target cancer cells that have reduced MHC expression and are therefore less responsive to therapies targeting the adaptive immune system. In order to investigate this concept with NKG2D×B7H3 NKEs, an assay was performed comparing the effects of NKEs on wild-type MDA-MB-231 cells with the effects of NKEs on MDA-MB-231 cells in which a component of the MHC, beta-2 microglobulin (B2M), has been knocked out. NK cells were added to MDA-MB-231 WT or MDA-MB-231 B2M knockout cells at a 5:1 E:T ratio. XENP38597 or XENP40377 were added at a range of 0.1 μg/ml to 10 μg/ml, and the target cell count was recorded over time by Incucyte. As apparent in FIG. 28, NKEs delivered as a single agent showed significantly improved cell killing on MDA-MB-231 B2M knockout cells compared to MDA-MB-231 WT cells.

[0568] In addition, as seen most clearly when the NKE concentration is 0.1 μg/ml, XENP40377, having higher affinity B7H3 binding domain 38E2, killed target cells more effectively than XENP38597, having the comparatively lower affinity B7H3 binding domain 2E4A3.189. This demonstrates that tumor antigen domain affinity is important for functional activity.

### Example 8: NKEs Provide Co-Stimulation Signal to T-Cells in Presence of TCR-Mediated Signaling Resulting in Tumor Lysis

[0569] In order to assess the ability of NKEs to provide co-stimulation to T-cells and thereby enhance tumor cell killing, an experiment was performed in which T cells were added to MCF7 target cells at a 5:1 E:T ratio. All cells were dosed at a constant concentration of 10 μg/ml of NKEs. One NKE used in this experiment was XENP38597, having a 1D7B4 NKG2D binding domain. The other two NKEs used were XENP38600 and XENP38601, which have the same format and B7H3 binding domain as XENP38597, but which use comparator NKG2D binding domains instead. Sequences for XENP38600 and XENP38601 are depicted in FIG. 26. The cells were also treated with a B7H3×CD3 T-cell engager (e.g., an anti-B7H3×anti-CD3 bispecific antibody) at doses ranging from 1.52 ng/ml to 10 μg/ml. The cells were incubated in the Incucyte, where target cell viability was measured every 6 hours over a span of 160 hours. As can be seen in FIG. 29A, XENP38597 was able to activate T cells starting even at the lowest dose of TCR stimulation. On the other hand, the comparator molecules do not begin to demonstrate any lysis of tumor cells until much higher doses of B7H3×CD3 XENP31346; doses at which the T cell engager begins to effectively lyse tumor cells independently. Only XENP38597, and not the comparator molecules, were able to co-stimulate T cells to kill tumor cells.

### Example 9: NKEs Synergize with Pro-Inflammatory Cytokines in Killing Target Cells

[0570] 9A: NKEs Show Synergistic Activity when Combined with IL-15

[0571] In order to determine the effect of IL-15 on NKEs ability to kill target cells, an experiment was conducted in which NK cells were co-cultured with OVCAR8-NIR target cells at a 5:1 E:T ratio. A control group of cells was then left alone, while other groups were dosed with either 10 μg/ml IL15-Fc (XENP24045, the sequence for which is depicted in FIG. 22), 10 μg/ml NKG2D×B7H3 bsAb (XENP38597), or both. Target cell counts were then measured over time using Incucyte. As seen in FIG. 30, the combination of both IL15-Fc and NKG2D×B7H3 bsAb was significantly more efficacious in killing target cells than either of the two treatments alone.

[0572] In an additional experiment depicted in FIG. 33, XENP38597 was compared with other XENPs in the 1+1 Fab-scFv-Fc format having different NKG2D binding domains. NK cells were co-cultured with OVCAR8 target cells at a 5:1 E:T ratio. Cells were dosed with 10 μg/ml IL-15 Fc (XENP24045) and NKEs were titrated in at a dose range of 0.2 ng/ml to 10 μg/ml. Incucyte was used to quantify target cells over time. As seen in FIG. 33, XENP38597 and XENP38596, having ID7B4 and ID2B4 NKG2D binding domains respectively, demonstrated better dose response and synergy with IL-15 compared to XENP38599 (having the mAb C NKG2D binding domain) or XENP38598 (having the mAb D NKG2D binding domain).

[0573] 9B: NKEs Show Synergistic Activity when Combined with IL-12

[0574] In order to investigate whether NKEs might have synergy with other cytokines in addition to IL-15, another experiment was performed in which NK cells were co-cultured with MCF7 target cells at a 5:1 E:T ratio. A control group of cells was then left alone, while other groups were dosed with either 10 μg/ml IL12-Fc (XENP27201, sequence for which is depicted in FIG. 22), 4 μg/ml NKG2D×B7H3 bsAb (XENP40377), or both. Target cell counts were then measured over time using Incucyte. As seen in FIG. 31A, the combination of both IL12-Fc and XENP40377 also showed significantly better target cell killing than either of the two treatments alone. In a second similar Incucyte experiment, cells were again dosed with 4 μg/ml XENP40377 alone or in combination with IL-12-Fc, but using 2 μg/ml of IL-12-Fc XmAb662 (XENP39662, the sequence for which is depicted in FIG. 22) rather than XENP27201. Again, as depicted in FIG. 31B, the combination of IL-12-Fc with XENP40377 demonstrates much better killing than either treatment alone.

### Example 10: Additional Engineering of Anti-NKG2D Binding Domain ID7B4

[0575] Because NKEs can engage NK cells via more than one domain (e.g., the anti-NKG2D binding domain and the Fc domain), trans engagement between NK cells can lead to fratricide. It was hypothesized that fratricide could be minimized through decreasing NKG2D affinity to a point where there is no fratricide but there is still on-target potency. Toward this end, a library of anti-NKG2D clones with detuned affinity was designed based on the 1D7B4 clone. The detuned anti-NKG2D variants were incorporated into NKEs and tested for their ability to provide on-target toxicity and avoid fratricide.

[0576] 10A: Establishing a 1D7B4 Affinity Ladder

[0577] The detuned 1D7B4 variants were produced as bivalent antibodies (sequences for which are depicted in FIG. 54) and as His-tagged Fabs in order to facilitate biophysical analysis on Octet and Biacore. The detuned 1D7B4 variable heavy chains and their respective CDRs are depicted in FIG. 58. In an initial Octet HTX screen of all detuned 1D7B4 variants, NKG2D antigen was captured at 20 nM for 5 min using AHC sensors, and then dipped into ˜300, 100, 33.3 and 0 nM of each Fab in supernatant. A table summarizing the test article mutations and affinity values is depicted in FIG. 42. From this screening, a smaller set was selected as an affinity ladder to move forward for further analysis. Selected detuned 1D7B4 variants were then produced in 1+1 Fab-scFv-Fc format (with a B7H3 Fab and NKG2D scFv), sequences for which are depicted in FIG. 59. These constructs were then analyzed using a Biacore T200. A CM5 chip was amine coupled to anti-His capture mAb with XENP23311 (His-tagged NKG2D-Fc, sequence for which is depicted in FIG. 11) and Acro Bio's commercial human NKG2D ligands. Then the detuned 1D7B4 analytes in the B7H3×NKG2D 1+1 Fab-scFv-Fc format were flowed at concentrations of 15000, 5000, 1666.7, 555.6, 185.2, 61.7, 20.6, 6.9, 2.3, 0.76, and 0.25 nM with a 5 minute association and 10 minute dissociation time. The experiment was run at 25° C. FIG. 43 depicts the affinity data of these constructs for NKG2D-Fc. As shown, XENP42652, XENP42653, XENP42654, XENP42655, and XENP42656 formed a decreased affinity ladder when compared to XENP40375.

[0578] 10B: Detuned 1D7B4 Variant B7H3×NKG2D NKEs Decrease Fratricide

[0579] In order to investigate whether the detuned 1D7B4 variants were able to decrease fratricide levels, an experiment was performed to assess cell killing in the presence of NK cells only. In this experiment, 100,000 NK cells were added to each well of a plate, and serial dilutions of detuned 1D7B4 NKE test articles were added. A CD107a staining antibody was also added, and cells were incubated overnight for −12 hours. The next day, cells were stained with Zombie Aqua and analyzed via flow cytometry. One of the 1D7B4 detuned variant NKEs, the H1.28 variant, showed no decrease in the percentage of NK cells killed compared to the parental clone, XENP40377. However, the rest of the clones in this experiment all showed a range of significant reductions in fratricide, as measured by percentage of dead NK cells and depicted in FIG. 44. XENP42659 (having the 1D7B4_H1.23 variant), XENP42661 (having the 1D7B4_H1.31 variant) and XENP42662 (having the 1D7B4_H1.33 variant) showed the greatest reductions in fratricide. Additionally, there was a decrease in NK cell degranulation, measured by the percentage of CD107a+ NK cells as seen in FIG. 44. It should be noted that all the test articles in this experiment all utilize the “v90” S239D/I332E Fc variants, and when the experiment is repeated using test articles having WT Fc, fratricide is not well detected in vitro (data not shown).

[0580] 10C: Detuned 1D7B4 Variant B7H3×NKG2D NKEs Retain Activity Both Independently and Synergistically with IL-15

[0581] In order to explore the impact of detuning 1D7B4 affinity on the ability of NKEs to lyse target cells, an experiment was conducted in which A375 target cells were plated and cultured with effector cells at 5:1 E:T ratio. Treatments were added at a range of concentrations as indicated in FIG. 45, with or without the addition of 5 μg/ml IL-15-Fc. Target cell death was assessed using Incucyte. As seen in FIG. 45, detuned NKEs retained the ability to kill target cells and induce IFNγ production, and these activities are enhanced when combined with IL-15. In summary, H1.3 and H1.28 were potent but had high fratricide, H1.33 showed no fratricide but also no additive activity on top of ADCC, while H1.31 and H1.23 have reduced fratricide and retained NKG2D agonistic activity. Similar results confirming this activity ranking were attained by repeating the experiment using five different huPBMC donors, and the results graphing the EC50 values from the target cell lysis curves with each different donor are depicted in FIG. 45B.

### Example 11: Further Tuning of NKE Function Through Format Modification

### Example 11A: Effects of NKG2D Fv Format and Position

[0582] NKEs in the 1+1 Fab-scFv-Fc format can be designed with either an anti-B7113 Fab arm and anti-NKG2D scFv arm, or an anti-NKG2D Fab arm and anti-B7113 scFv arm. An experiment was performed to assess the impact of these alternative formats on the levels of fratricide. NK cells were plated alone (without any target cells present), and then test articles were added at a range of doses as shown in FIG. 46 and incubated for 12 hours before assessing cell viability. As illustrated in FIG. 46, there is a reduction in the potency of NK cell fratricide when the anti-NKG2D Fv is in the scFv format. However, the reduction is less pronounced when there is a higher affinity variant of CD16 is expressed on the NK cells, highlighting the influence that V90-enhanced Fc binding to CD16 maintains in contributing to fratricide. An additional experiment was performed in which the binding to NK cells was assessed for an NKE in the 1+1 Fab-scFv-Fc format having a B7H3 Fab and NKG2D scFv (XENP38101), an NKE in the 1+1 Fab-scFv-Fc format having an NKG2D Fab and B7H3 scFv (XENP40376), and an NKE in the mAb-scFv format having B7H3 Fab arms and an NKG2D scFv (XENP40557). All 3 constructs were made in the FcKO format so that the NK cell binding being measured would not be affected by the binding of the Fc region to CD16. As depicted in FIG. 47, XENP38101 had the highest efficacy and affinity, followed by XENP40376 and XENP40557. Taken together, these experiments show that each format may provide unique advantages in certain contexts.

### Example 11B: Impact of NKG2D scFv Domain Orientation on Affinity

[0583] Whether an scFv is in the VHVL or VLVH orientation may have an impact on the affinity of the scFv for its target. NKEs having a B7H3 Fab and an NKG2D scFv were tested for their affinity in both scFv orientations in the 1+1 Fab-scFv-Fc, 2+1 Fab₂-scFv-Fc, and 2+1 mAb-scFv formats. This experiment was performed using Octet HTX with an HIS1K chip. His-tagged NKG2D antigen (XENP23311) was captured at 20 nM for 3 min and dipped into NKE test articles at concentrations of 300, 100, 33.3, 11.1, 3.7, 1.23, 0.41 and 0 nM with a 3 min association and 5 min dissociation time. Each sample was run in duplicate. As illustrated by the KD values in FIG. 48, the affinity of the 1D2B4 and 1D7B4 clones were less affected by the changes in orientation than comparator clones LB1001 or LB1002. This unexpected ability to retain a more similar affinity in either the VHVL or VLVH contexts may provide unique advantages in certain contexts.

### Example 12: NKEs Activate NK Cells and CD8+ T Cells In Vivo

[0584] In order to test the ability of NKEs to activate NK cells in vivo, a mouse study was initiated. In this study, female huCD34+ NSG mice were inoculated intradermally with 3×10⁶ ppMCF7-GFP cells per mouse on Day −16. Then on Day 0, they were dosed with a 5 mg/kg NKE treatment and a 0.2 mg/kg IL-15-Fc (XENP24045) treatment intraperitoneally. Dosing was repeated weekly for 4 weeks, and blood was drawn weekly for peripheral lymphocyte cell counts. As depicted in FIG. 49A and FIG. 49B, from a peripheral blood analysis on Day 21, CD69 is upregulated in NK cells and CD8+ T cells in groups treated with NKG2D×B7H3 NKEs but not in groups treated with RSV×B7H3 controls. This demonstrates that NKEs successfully induce NK cell and CD8+ T cell activation in vivo via NKG2D engagement. Additionally, as depicted in FIG. 49C, NKG2D-targeting NKEs also increased the percentage of IFNγ positive NK cells. Lastly, as shown in FIG. 49D, NKG2D-targeting NKEs induce proliferation as measured by the percentage of Ki-67+ cells on Day 21.

### Example 13: NKEs Induce NK-Mediated IFNγ Production

[0585] The hallmark of NKG2D-targeting NKEs is a potent induction of IFNγ production via the NKG2D pathway agonism, independent of FcγR engagement. This can be illustrated in an experiment in which NK cells were co-cultured with A375-B2M-KO-RFP tumor cell line and treated with either an NKG2D×B7H3 NKE or an RSV×B7H3 isotype control, both having an FcKO Fc region with ablated FcγR binding. Tumor cell growth was assessed with Incucyte. As depicted in FIG. 61, independent of FcγR engagement, the NKG2D targeting XENP40367 was able to induce IFNγ production.

1. A heterodimeric antibody comprising:
a) a first monomer comprising:
i) an anti-NKG2D scFv comprising a first variable heavy VH1 domain, an scFv linker and a first variable light VL1 domain; and
ii) a first Fc domain, wherein the scFv is covalently attached to the N-terminus of the first Fc domain using a domain linker;
b) a second monomer comprising a VH2-CH1-hinge-CH2-CH3 monomer, wherein VH2 is a second variable heavy domain and CH2-CH3 is a second Fc domain; and
c) a light chain comprising a second variable light VL2 domain,
wherein the second variable heavy VH2 domain and the second variable light VL2 domain form an B7H3 antigen binding domain, and
wherein the first Fc domain and/or the second Fc domain comprise an amino acid substitution(s) selected from the group consisting of S239D, I332E, S239D/I332E, G236A, S239E, I332D, G236A/I332E, S239D/I332E/A330L, I332E/A330L, F243L, and S298A, wherein numbering is according to EU numbering and have enhanced FcγRIIIA (CD16a) binding compared to first and second Fc domains lacking such substitution(s).

2. The heterodimeric antibody according to claim 1, wherein the B7H3 antigen binding domain comprises a set of vhCDR1-3 and vlCDR1-3 from a variable heavy domain and variable light domain pair selected from the group consisting of SEQ ID NOS: 27, 28, and 29 for vhCDR1-3 and SEQ ID NOS: 30, 31, and 32 for vlCDR1-3 of 38E2[B7H3]_H2_L1.1; and SEQ ID NOS: 20, 21, and 22 for vhCDR1-3 and SEQ ID NOS: 23, 24, and 26 for vlCDR1-3 of 2E43.189[B7H3]_H1.22_L1, as depicted in FIGS. 13 and 14.

3. (canceled)

4. The heterodimeric antibody according to claim 1, wherein the anti-NKG2D scFv comprises a set of vhCDR1-3 and the vlCDR1-3 from a variable heavy domain and variable light domain pair selected from the group consisting of SEQ ID NOS: 2612-2614 for vhCDR1-3 and SEQ ID NOS: 2616-2618 for vlCDR1-3 of mAb-D[NKG2D]; SEQ ID NOS: 17-18 and 1256 for vhCDR1-3 of 1D7B4[NKG2D]_H1.23 and SEQ ID NOS: 23, 24, and 26 for vlCDR1-3 of 1D7B4[NKG2D]_L1; SEQ ID NOS: 17-18 and 1272 for vhCDR1-3 of 1D7B4[NKG2D]_H1.31 and SEQ ID NOS: 23, 24, and 26 for vlCDR1-3 of 1D7B4[NKG2D]_L1; and SEQ ID NOS: 17-19 for vhCDR1-3 and SEQ ID NOS: 23, 24, and 26 for vlCDR1-3 of 1D7B4[NKG2D]_H1_L1, as depicted in FIGS. 23 and 58.

5. (canceled)

6. The heterodimeric antibody according to claim 1, wherein the first variable light domain of the anti-NKG2D scFv is covalently attached to the N-terminus of the first Fc domain using a domain linker or the first variable heavy domain of the anti-NKG2D scFv is covalently attached to the N-terminus of the first Fc domain using a domain linker.

7. (canceled)

8. The heterodimeric antibody according to claim 1, wherein the scFv linker is a charged scFv linker.

9. (canceled)

10. The heterodimeric antibody according to claim 1, wherein the first domain and/or second domain comprise an amino acid substitution(s) selected from the group consisting of S239D, I332E, S239D/I332E, G236A, S239E, I332D, G236A/I332E, S239D/I332E/A330L, I332E/A330L, F243L, and S298A, wherein numbering is according to EU numbering.

11. (canceled)

12. (canceled)

13. The heterodimeric antibody according to claim 1, wherein the first or second Fc domain comprises the amino acid substitutions S239D/I332E, wherein numbering is according to EU numbering.

14. The heterodimeric antibody according to claim 1, wherein the first and second Fc domains further comprise a set of heterodimerization variants selected from the group consisting of those depicted in FIGS. 1A-1E, wherein numbering is according to EU numbering.

15. (canceled)

16. The heterodimeric antibody according to claim 1, wherein the first or second Fc domain further comprises one or more pI variants.

17. (canceled)

18. The heterodimeric antibody according to claim 1, wherein the first and second monomers each further comprise amino acid substitutions selected from the group consisting of M428L/N434S, M428L/N434A, and M252Y/S254T/T256E, wherein numbering is according to EU numbering.

19. The heterodimeric antibody according to claim 1, selected from the group consisting of: the amino acid sequences of SEQ ID NOS: 4, 5 and 6 of XENP40377; the amino acid sequences of SEQ ID NOS: 1309-1310 and 6 of XENP42653; and the amino acid sequences of SEQ ID NOS: 1313-1314 and 6 of XENP42655, as depicted in FIGS. 19 and 59.

20. A nucleic acid composition comprising nucleic acids encoding the first and second monomers and the light chain of the antibody according to claim 1.

21. An expression vector comprising the nucleic acids according to claim 20.

22. A host cell transformed with an expression vector according to claim 21.

23. A method of making a heterodimeric antibody comprising culturing the host cell according to claim 22 under conditions wherein the heterodimeric antibody is expressed, and recovering the heterodimeric antibody.

24. A heterodimeric antibody comprising:
a) a first monomer comprising:
i) an anti-B7H3 scFv comprising a first variable heavy VH1 domain, an scFv linker and a first variable light VL1 domain; and
ii) a first Fc domain, wherein the scFv is covalently attached to the N-terminus of the first Fc domain using a domain linker;
b) a second monomer comprising a VH2-CH1-hinge-CH2-CH3 monomer, wherein VH2 is a second variable heavy domain and CH2-CH3 is a second Fc domain; and
c) a light chain comprising a second variable light VL2 domain,
wherein the second variable heavy domain and the second variable light domain form an NKG2D antigen binding domain, and
wherein the first Fc domain and/or the second Fc domain comprise an amino acid substitution(s) selected from the group consisting of S239D, I332E, S239D/I332E, G236A, S239E, I332D, G236A/I332E, S239D/I332E/A330L, I332E/A330L, F243L, and S298A, wherein numbering is according to EU numbering and have enhanced FcγRIIIA (CD16a) binding compared to first and second Fc domains lacking such substitution(s).

25.-41. (canceled)

42. The heterodimeric antibody according to claim 24, selected from the group consisting of the amino acid sequences of SEQ ID NOS: 1, 2 and 3 of XENP38597; the amino acid sequences of SEQ ID NOS:7, 8 and 3 of XENP38101; the amino acid sequences of SEQ ID NOS: 9, 10 and 3 of XENP38108; and the amino acid sequences of SEQ ID NOS: 12, 2, and 13 of XENP38598, as depicted in FIGS. 19 and 59.

43.-116. (canceled)

117. A method of treating cancer or reducing tumor growth or inhibiting cancer cell proliferation in a subject in need thereof comprising administering to the subject a therapeutically effective amount of the heterodimeric antibody of claim 1 or antigen binding fragment thereof to the subject.

118. The method of claim 117, further comprising administering an IL-12-Fc fusion protein and/or an IL-15-Fc fusion protein to the subject.

119. The method of claim 117, further comprising administering a bispecific T-cell engager antibody or an antigen binding fragment thereof to the subject.

120.-125. (canceled)

The application's sequence listing, which the Patent Office published only in electronic form, follows.

SEQUENCE LISTING (2621 sequences)

SEQ ID NO: 1 - protein, 451 aa, synthetic construct
  source 1..451: note = XENP38597 Chain 1- 1D7B4[NKG2D]_H1_Fab-IgG1_pI(-)_Isosteric_A_S239D/I332E/L368 D/K370S
EVQLLESGGGLVQPGGSLRLSCAASGFTFSSYAMSWVRQAPGKGLEWVSSISASGGSTYYADSVKGRFTISRDNSKNTLYLQMNSLRAEDTAVYYCAKGIFSIYFFYFDYWGQGTLVTVSSASTKGPSVFPLAPSSKSTSGGTAALGCLVKDYFPEPVTVSWNSGALTSGVHTFPAVLQSSGLYSLSSVVTVPSSSLGTQTYICNVNHKPSDTKVDKKVEPKSCDKTHTCPPCPAPELLGGPDVFLFPPKPKDTLMISRTPEVTCVVVDVSHEDPEVKFNWYVDGVEVHNAKTKPREEEYNSTYRVVSVLTVLHQDWLNGKEYKCKVSNKALPAPEEKTISKAKGQPREPQVYTLPPSREEMTKNQVSLTCDVSGFYPSDIAVEWESDGQPENNYKTTPPVLDSDGSFFLYSKLTVDKSRWEQGDVFSCSVMHEALHNHYTQKSLSLSPGK

SEQ ID NO: 2 - protein, 478 aa, synthetic construct
  source 1..478: note = XENP38597 Chain 2- 2E4A3.189[B7H3]_H1.22_L1_scFv(GKPGS)4-Fc(216)_IgG1_C220S/S2 39D/I332E/S364K/E357Q
QVQLVQSGAEVKKPGASVKVSCKASGYIFTNNYMHWVRQAPGQGLEWMGIISPSVGRTAYAQKFQGRVTMTRDTSTSTVYMELSSLRSEDTAVYYCARGGGSSPRLDYWGQGTLVTVSSGKPGSGKPGSGKPGSGKPGSDIQMTQSPSSLSASVGDRVTITCRASQSISSYLNWYQQKPGKAPKLLIYAASSLQSGVPSRFSGSGSGTDFTLTISSLQPEDFATYYCQQSYSTPFTFGQGTKLEIKEPKSSDKTHTCPPCPAPELLGGPDVFLFPPKPKDTLMISRTPEVTCVVVDVSHEDPEVKFNWYVDGVEVHNAKTKPREEQYNSTYRVVSVLTVLHQDWLNGKEYKCKVSNKALPAPEEKTISKAKGQPREPQVYTLPPSREQMTKNQVKLTCLVKGFYPSDIAVEWESNGQPENNYKTTPPVLDSDGSFFLYSKLTVDKSRWQQGNVFSCSVMHEALHNHYTQKSLSLSPGK

SEQ ID NO: 3 - protein, 214 aa, synthetic construct
  source 1..214: note = XENP38571 Chain 2-2E4A3.189[B7H3]_L1 Light Chain
DIQMTQSPSSLSASVGDRVTITCRASQSISSYLNWYQQKPGKAPKLLIYAASSLQSGVPSRFSGSGSGTDFTLTISSLQPEDFATYYCQQSYSTPYTFGQGTKLEIKRTVAAPSVFIFPPSDEQLKSGTASVVCLLNNFYPREAKVQWKVDNALQSGNSQESVTEQDSKDSTYSLSSTLTLSKADYEKHKVYACEVTHQGLSSPVTKSFNRGEC

SEQ ID NO: 4 - protein, 447 aa, synthetic construct
  source 1..447: note = XENP40377 Chain 1- 38E2[B7H3]_H2_Fab-IgG1_pI(-)_Isosteric_A_S239D/I332E/L368D/ K370S
EVQLLESGGGLVQPGGSLRLSCAVSGFSLSSYGVIWVRQAPGKGLEYVSWVSSGGSTNYASSVKGRFTISRDTSKNTVYLQMNSLRAEDTAVYFCARGATNSGTDIWGPGTLVTVSSASTKGPSVFPLAPSSKSTSGGTAALGCLVKDYFPEPVTVSWNSGALTSGVHTFPAVLQSSGLYSLSSVVTVPSSSLGTQTYICNVNHKPSDTKVDKKVEPKSCDKTHTCPPCPAPELLGGPDVFLFPPKPKDTLMISRTPEVTCVVVDVSHEDPEVKFNWYVDGVEVHNAKTKPREEEYNSTYRVVSVLTVLHQDWLNGKEYKCKVSNKALPAPEEKTISKAKGQPREPQVYTLPPSREEMTKNQVSLTCDVSGFYPSDIAVEWESDGQPENNYKTTPPVLDSDGSFFLYSKLTVDKSRWEQGDVFSCSVMHEALHNHYTQKSLSLSPGK

SEQ ID NO: 5 - protein, 480 aa, synthetic construct
  source 1..480: note = XENP40377 Chain 2- 1D7B4[NKG2D]_H1L1_scFv(GKPGS)4-Fc(216)_IgG1_C220S/S239D/I33 2E/S364K/E357Q
EVQLLESGGGLVQPGGSLRLSCAASGFTFSSYAMSWVRQAPGKGLEWVSSISASGGSTYYADSVKGRFTISRDNSKNTLYLQMNSLRAEDTAVYYCAKGIFSIYFFYFDYWGQGTLVTVSSGKPGSGKPGSGKPGSGKPGSDIQMTQSPSSLSASVGDRVTITCRASQSISSYLNWYQQKPGKAPKLLIYAASSLQSGVPSRFSGSGSGTDFTLTISSLQPEDFATYYCQQSYSTPYTFGQGTKLEIKEPKSSDKTHTCPPCPAPELLGGPDVFLFPPKPKDTLMISRTPEVTCVVVDVSHEDPEVKFNWYVDGVEVHNAKTKPREEQYNSTYRVVSVLTVLHQDWLNGKEYKCKVSNKALPAPEEKTISKAKGQPREPQVYTLPPSREQMTKNQVKLTCLVKGFYPSDIAVEWESNGQPENNYKTTPPVLDSDGSFFLYSKLTVDKSRWQQGNVFSCSVMHEALHNHYTQKSLSLSPGK

SEQ ID NO: 6 - protein, 217 aa, synthetic construct
  source 1..217: note = XENP40377 Chain 3- 38E2[B7H3]_L1.1_Light Chain
DIVMTQSPSSLSASVGDRVTITCRASQSINSWLSWYQQKPGKPPKLLIYGASNLASGVPSRFKGSGSGTDFTLTISSLQPEDFATYYCQNNYGIIAAGATFGGGTKVEIKRTVAAPSVFIFPPSDEQLKSGTASVVCLLNNFYPREAKVQWKVDNALQSGNSQESVTEQDSKDSTYSLSSTLTLSKADYEKHKVYACEVTHQGLSSPVTKSFNRGEC

SEQ ID NO: 7 - protein, 450 aa, synthetic construct
  source 1..450: note = XENP38101 Chain 1- 1D7B4[NKG2D]_H1-IgG1_pI(-)_Isosteric_A_PVA_/S267K/L368D/K37 0S
EVQLLESGGGLVQPGGSLRLSCAASGFTFSSYAMSWVRQAPGKGLEWVSSISASGGSTYYADSVKGRFTISRDNSKNTLYLQMNSLRAEDTAVYYCAKGIFSIYFFYFDYWGQGTLVTVSSASTKGPSVFPLAPSSKSTSGGTAALGCLVKDYFPEPVTVSWNSGALTSGVHTFPAVLQSSGLYSLSSVVTVPSSSLGTQTYICNVNHKPSDTKVDKKVEPKSCDKTHTCPPCPAPPVAGPSVFLFPPKPKDTLMISRTPEVTCVVVDVKHEDPEVKFNWYVDGVEVHNAKTKPREEEYNSTYRVVSVLTVLHQDWLNGKEYKCKVSNKALPAPIEKTISKAKGQPREPQVYTLPPSREEMTKNQVSLTCDVSGFYPSDIAVEWESDGQPENNYKTTPPVLDSDGSFFLYSKLTVDKSRWEQGDVFSCSVMHEALHNHYTQKSLSLSPGK

SEQ ID NO: 8 - protein, 477 aa, synthetic construct
  source 1..477: note = XENP38101 Chain 2-2E4A3.189[B7H3]_H1.22_L1_scFv(GKPGS)4-Fc(216)_IgG1_C220S/ PVA_/S267K/S364K/E357Q
QVQLVQSGAEVKKPGASVKVSCKASGYIFTNNYMHWVRQAPGQGLEWMGIISPSVGRTAYAQKFQGRVTMTRDTSTSTVYMELSSLRSEDTAVYYCARGGGSSPRLDYWGQGTLVTVSSGKPGSGKPGSGKPGSGKPGSDIQMTQSPSSLSASVGDRVTITCRASQSISSYLNWYQQKPGKAPKLLIYAASSLQSGVPSRFSGSGSGTDFTLTISSLQPEDFATYYCQQSYSTPFTFGQGTKLEIKEPKSSDKTHTCPPCPAPPVAGPSVFLFPPKPKDTLMISRTPEVTCVVVDVKHEDPEVKFNWYVDGVEVHNAKTKPREEQYNSTYRVVSVLTVLHQDWLNGKEYKCKVSNKALPAPIEKTISKAKGQPREPQVYTLPPSREQMTKNQVKLTCLVKGFYPSDIAVEWESNGQPENNYKTTPPVLDSDGSFFLYSKLTVDKSRWQQGNVFSCSVMHEALHNHYTQKSLSLSPGK

SEQ ID NO: 9 - protein, 451 aa, synthetic construct
  source 1..451: note = XENP38108 Chain 1- 1D7B4[NKG2D]_H1_Fab-IgG1_pI(-)_Isosteric_A_L368D/K370S
EVQLLESGGGLVQPGGSLRLSCAASGFTFSSYAMSWVRQAPGKGLEWVSSISASGGSTYYADSVKGRFTISRDNSKNTLYLQMNSLRAEDTAVYYCAKGIFSIYFFYFDYWGQGTLVTVSSASTKGPSVFPLAPSSKSTSGGTAALGCLVKDYFPEPVTVSWNSGALTSGVHTFPAVLQSSGLYSLSSVVTVPSSSLGTQTYICNVNHKPSDTKVDKKVEPKSCDKTHTCPPCPAPELLGGPSVFLFPPKPKDTLMISRTPEVTCVVVDVSHEDPEVKFNWYVDGVEVHNAKTKPREEEYNSTYRVVSVLTVLHQDWLNGKEYKCKVSNKALPAPIEKTISKAKGQPREPQVYTLPPSREEMTKNQVSLTCDVSGFYPSDIAVEWESDGQPENNYKTTPPVLDSDGSFFLYSKLTVDKSRWEQGDVFSCSVMHEALHNHYTQKSLSLSPGK

SEQ ID NO: 10 - protein, 478 aa, synthetic construct
  source 1..478: note = XENP38108 Chain 2-2E4A3.189[B7H3]_H1.22_L1_scFv(GKPGS)4-Fc(216)_IgG1_C220S/ S364K/E357Q
QVQLVQSGAEVKKPGASVKVSCKASGYIFTNNYMHWVRQAPGQGLEWMGIISPSVGRTAYAQKFQGRVTMTRDTSTSTVYMELSSLRSEDTAVYYCARGGGSSPRLDYWGQGTLVTVSSGKPGSGKPGSGKPGSGKPGSDIQMTQSPSSLSASVGDRVTITCRASQSISSYLNWYQQKPGKAPKLLIYAASSLQSGVPSRFSGSGSGTDFTLTISSLQPEDFATYYCQQSYSTPFTFGQGTKLEIKEPKSSDKTHTCPPCPAPELLGGPSVFLFPPKPKDTLMISRTPEVTCVVVDVSHEDPEVKFNWYVDGVEVHNAKTKPREEQYNSTYRVVSVLTVLHQDWLNGKEYKCKVSNKALPAPIEKTISKAKGQPREPQVYTLPPSREQMTKNQVKLTCLVKGFYPSDIAVEWESNGQPENNYKTTPPVLDSDGSFFLYSKLTVDKSRWQQGNVFSCSVMHEALHNHYTQKSLSLSPGK

SEQ ID NO: 11 - protein, 451 aa, synthetic construct
  source 1..451: note = XENP38596 Chain 1- 1D2B4[NKG2D]_H1_IgG1_pI(-)_Isosteric_A_S239D/I332E/L368D/K3 70S
EVQLLESGGGLVQPGGSLRLSCAASGFTFSSFGMSWVRQAPGKGLEWVSTISGSGSTTYYADSVKGRFTISRDNSKNTLYLQMNSLRAEDTAVYYCAKGVFSEWHYYFDYWGQGTLVTVSSASTKGPSVFPLAPSSKSTSGGTAALGCLVKDYFPEPVTVSWNSGALTSGVHTFPAVLQSSGLYSLSSVVTVPSSSLGTQTYICNVNHKPSDTKVDKKVEPKSCDKTHTCPPCPAPELLGGPDVFLFPPKPKDTLMISRTPEVTCVVVDVSHEDPEVKFNWYVDGVEVHNAKTKPREEEYNSTYRVVSVLTVLHQDWLNGKEYKCKVSNKALPAPEEKTISKAKGQPREPQVYTLPPSREEMTKNQVSLTCDVSGFYPSDIAVEWESDGQPENNYKTTPPVLDSDGSFFLYSKLTVDKSRWEQGDVFSCSVMHEALHNHYTQKSLSLSPGK

SEQ ID NO: 12 - protein, 452 aa, synthetic construct
  source 1..452: note = XENP38598 Chain 1- mAb D[NKG2D]_H1_IgG1_pI(-)_Isosteric_A_S239D/I332E/L368D/K370S
QVQLVQSGAEVKKPGASVKVSCKASGYTFTNYWMHWVRQAPGQGLEWMGEIDPSDIYTNYAQKFQGRVTMTRDTSTSTVYMELSSLRSEDTAVYYCARGIYDGYYVYGMDYWGQGTTVTVSSASTKGPSVFPLAPSSKSTSGGTAALGCLVKDYFPEPVTVSWNSGALTSGVHTFPAVLQSSGLYSLSSVVTVPSSSLGTQTYICNVNHKPSDTKVDKKVEPKSCDKTHTCPPCPAPELLGGPDVFLFPPKPKDTLMISRTPEVTCVVVDVSHEDPEVKFNWYVDGVEVHNAKTKPREEEYNSTYRVVSVLTVLHQDWLNGKEYKCKVSNKALPAPEEKTISKAKGQPREPQVYTLPPSREEMTKNQVSLTCDVSGFYPSDIAVEWESDGQPENNYKTTPPVLDSDGSFFLYSKLTVDKSRWEQGDVFSCSVMHEALHNHYTQKSLSLSPGK

SEQ ID NO: 13 - protein, 214 aa, synthetic construct
  source 1..214: note = XENP38598 Chain 3- mAb D[NKG2D]_L1 Light Chain
YIQMTQSPSSLSASVGDRVTITCRSSQDISNYLNWYQQKPGKAPKLLIYYTSRLHSGVPSRFSGSGSGTDFTFTISSLQPEDIATYYCQQGKTLPRTFGGGTKVEIKRTVAAPSVFIFPPSDEQLKSGTASVVCLLNNFYPREAKVQWKVDNALQSGNSQESVTEQDSKDSTYSLSSTLTLSKADYEKHKVYACEVTHQGLSSPVTKSFNRGEC

SEQ ID NO: 14 - protein, 450 aa, synthetic construct
  source 1..450: note = XENP38599 Chain 1- mAb C[NKG2D]_H2_IgG1_pI(-)_Isosteric_A_S239D/I332E/L368D/K370S
QVQLVQSGAEVKKPGASVKVSCKVSGFSLTIYGVHWVRQAPGQGLEWMGVIWSGGSTDYNAKFQGRVTMTKDNSKRTVYMELSSLRSEDTAVYYCSRKSHDGYYGVMDYWGQGTTVTVSSASTKGPSVFPLAPSSKSTSGGTAALGCLVKDYFPEPVTVSWNSGALTSGVHTFPAVLQSSGLYSLSSVVTVPSSSLGTQTYICNVNHKPSDTKVDKKVEPKSCDKTHTCPPCPAPELLGGPDVFLFPPKPKDTLMISRTPEVTCVVVDVSHEDPEVKFNWYVDGVEVHNAKTKPREEEYNSTYRVVSVLTVLHQDWLNGKEYKCKVSNKALPAPEEKTISKAKGQPREPQVYTLPPSREEMTKNQVSLTCDVSGFYPSDIAVEWESDGQPENNYKTTPPVLDSDGSFFLYSKLTVDKSRWEQGDVFSCSVMHEALHNHYTQKSLSLSPGK

SEQ ID NO: 15 - protein, 214 aa, synthetic construct
  source 1..214: note = XENP38599 Chain 3- mAb C[NKG2D]_L1 Light Chain
DIQLTQSPDFQSVTPKEKVTITCRASQSIGTSIHWYQQKPDQSPKLLIKYASESISGIPSRFSGSGSGTDFTLTINSLEAEDAATYYCQQSNTWPLTFGAGTKVEIKRTVAAPSVFIFPPSDEQLKSGTASVVCLLNNFYPREAKVQWKVDNALQSGNSQESVTEQDSKDSTYSLSSTLTLSKADYEKHKVYACEVTHQGLSSPVTKSFNRGEC

SEQ ID NO: 16 - protein, 480 aa, synthetic construct
  source 1..480: note = XENP40374 Chain 2-1D2B4[NKG2D]_H1L1_scFv(GKPGS)4-Fc(216)_IgG1_C220S/S239D/I 332E/S364K/E357Q
EVQLLESGGGLVQPGGSLRLSCAASGFTFSSFGMSWVRQAPGKGLEWVSTISGSGSTTYYADSVKGRFTISRDNSKNTLYLQMNSLRAEDTAVYYCAKGVFSEWHYYFDYWGQGTLVTVSSGKPGSGKPGSGKPGSGKPGSDIQMTQSPSSLSASVGDRVTITCRASQSISSYLNWYQQKPGKAPKLLIYAASSLQSGVPSRFSGSGSGTDFTLTISSLQPEDFATYYCQQSYSTPYTFGQGTKLEIKEPKSSDKTHTCPPCPAPELLGGPDVFLFPPKPKDTLMISRTPEVTCVVVDVSHEDPEVKFNWYVDGVEVHNAKTKPREEQYNSTYRVVSVLTVLHQDWLNGKEYKCKVSNKALPAPEEKTISKAKGQPREPQVYTLPPSREQMTKNQVKLTCLVKGFYPSDIAVEWESNGQPENNYKTTPPVLDSDGSFFLYSKLTVDKSRWQQGNVFSCSVMHEALHNHYTQKSLSLSPGK

SEQ ID NO: 17 - protein, 5 aa, synthetic construct
  source 1..5: note = 1D7B4[NKG2D]_H1 L1 - vhCDR1
SYAMS

SEQ ID NO: 18 - protein, 17 aa, synthetic construct
  source 1..17: note = 1D7B4[NKG2D]_H1 L1 - vhCDR2
SISASGGSTYYADSVKG

SEQ ID NO: 19 - protein, 12 aa, synthetic construct
  source 1..12: note = 1D7B4[NKG2D]_H1 L1 - vhCDR3
GIFSIYFFYFDY

SEQ ID NO: 20 - protein, 5 aa, synthetic construct
  source 1..5: note = XENP38597 scFv VHCDR1
NNYMH

SEQ ID NO: 21 - protein, 17 aa, synthetic construct
  source 1..17: note = XENP38597 scFv VHCDR2
IISPSVGRTAYAQKFQG

SEQ ID NO: 22 - protein, 10 aa, synthetic construct
  source 1..10: note = XENP38597 scFv VHCDR3
GGGSSPRLDY

SEQ ID NO: 23 - protein, 11 aa, synthetic construct
  source 1..11: note = 1D7B4[NKG2D]_H1 L1 - vlCDR1
RASQSISSYLN

SEQ ID NO: 24 - protein, 7 aa, synthetic construct
  source 1..7: note = 1D7B4[NKG2D]_H1 L1 - vlCDR2
AASSLQS

SEQ ID NO: 25 - protein, 9 aa, synthetic construct
  source 1..9: note = XENP38597 scFv VLCDR3
QQSYSTPFT

SEQ ID NO: 26 - protein, 9 aa, synthetic construct
  source 1..9: note = 1D7B4[NKG2D]_H1 L1 - vlCDR3
QQSYSTPYT

SEQ ID NO: 27 - protein, 5 aa, synthetic construct
  source 1..5: note = XENP40377 VHCDR1
SYGVI

SEQ ID NO: 28 - protein, 16 aa, synthetic construct
  source 1..16: note = XENP40377 VHCDR2
WVSSGGSTNYASSVKG

SEQ ID NO: 29 - protein, 9 aa, synthetic construct
  source 1..9: note = XENP40377 VHCDR3
GATNSGTDI

SEQ ID NO: 30 - protein, 11 aa, synthetic construct
  source 1..11: note = XENP40377 VLCDR1
RASQSINSWLS

SEQ ID NO: 31 - protein, 7 aa, synthetic construct
  source 1..7: note = XENP40377 VLCDR2
GASNLAS

SEQ ID NO: 32 - protein, 12 aa, synthetic construct
  source 1..12: note = XENP40377 VLCDR3
QNNYGIIAAGAT

SEQ ID NO: 33 - protein, 5 aa, synthetic construct
  source 1..5: note = 1D2B4[NKG2D] - vhCDR1
SFGMS

SEQ ID NO: 34 - protein, 17 aa, synthetic construct
  source 1..17: note = 1D2B4[NKG2D] - vhCDR2
TISGSGSTTYYADSVKG

SEQ ID NO: 35 - protein, 12 aa, synthetic construct
  source 1..12: note = 1D2B4[NKG2D] - vhCDR3
GVFSEWHYYFDY

SEQ ID NO: 36 - protein, 5 aa, synthetic construct
  source 1..5: note = XENP38598 VHCDR1
NYWMH

SEQ ID NO: 37 - protein, 17 aa, synthetic construct
  source 1..17: note = XENP38598 VHCDR2
EIDPSDIYTNYAQKFQG

SEQ ID NO: 38 - protein, 13 aa, synthetic construct
  source 1..13: note = XENP38598 VHCDR3
GIYDGYYVYGMDY

SEQ ID NO: 39 - protein, 11 aa, synthetic construct
  source 1..11: note = XENP38598 VLCDR1
RSSQDISNYLN

SEQ ID NO: 40 - protein, 7 aa, synthetic construct
  source 1..7: note = XENP38598 VLCDR2
YTSRLHS

SEQ ID NO: 41 - protein, 9 aa, synthetic construct
  source 1..9: note = XENP38598 VLCDR3
QQGKTLPRT

SEQ ID NO: 42 - protein, 5 aa, synthetic construct
  source 1..5: note = XENP38599 VHCDR1
IYGVH

SEQ ID NO: 43 - protein, 16 aa, synthetic construct
  source 1..16: note = XENP38599 VHCDR2
VIWSGGSTDYNAKFQG

SEQ ID NO: 44 - protein, 12 aa, synthetic construct
  source 1..12: note = XENP38599 VHCDR3
KSHDGYYGVMDY

SEQ ID NO: 45 - protein, 11 aa, synthetic construct
  source 1..11: note = XENP38599 VLCDR1
RASQSIGTSIH

SEQ ID NO: 46 - protein, 7 aa, synthetic construct
  source 1..7: note = XENP38599 VLCDR2
YASESIS

SEQ ID NO: 47 - protein, 9 aa, synthetic construct
  source 1..9: note = XENP38599 VLCDR23
QQSNTWPLT

SEQ ID NO: 48 - protein, 714 aa, synthetic construct
  source 1..714: note = XENP40591 Chain 2-38E2[B7H3]_H2_Fab_1D7B4[NKG2D]_H1_L1_scFv(GKPGS)4_(G4S)2_ Fc(222)_IgG1_S239D/I332E/S364K/E357Q
EVQLLESGGGLVQPGGSLRLSCAVSGFSLSSYGVIWVRQAPGKGLEYVSWVSSGGSTNYASSVKGRFTISRDTSKNTVYLQMNSLRAEDTAVYFCARGATNSGTDIWGPGTLVTVSSASTKGPSVFPLAPSSKSTSGGTAALGCLVKDYFPEPVTVSWNSGALTSGVHTFPAVLQSSGLYSLSSVVTVPSSSLGTQTYICNVNHKPSNTKVDKKVEPKSCGGGGSGGGGSEVQLLESGGGLVQPGGSLRLSCAASGFTFSSYAMSWVRQAPGKGLEWVSSISASGGSTYYADSVKGRFTISRDNSKNTLYLQMNSLRAEDTAVYYCAKGIFSIYFFYFDYWGQGTLVTVSSGKPGSGKPGSGKPGSGKPGSDIQMTQSPSSLSASVGDRVTITCRASQSISSYLNWYQQKPGKAPKLLIYAASSLQSGVPSRFSGSGSGTDFTLTISSLQPEDFATYYCQQSYSTPYTFGQGTKLEIKGGGGSGGGGSKTHTCPPCPAPELLGGPDVFLFPPKPKDTLMISRTPEVTCVVVDVSHEDPEVKFNWYVDGVEVHNAKTKPREEQYNSTYRVVSVLTVLHQDWLNGKEYKCKVSNKALPAPEEKTISKAKGQPREPQVYTLPPSREQMTKNQVKLTCLVKGFYPSDIAVEWESNGQPENNYKTTPPVLDSDGSFFLYSKLTVDKSRWQQGNVFSCSVMHEALHNHYTQKSLSLSPGK

SEQ ID NO: 49 - protein, 709 aa, synthetic construct
  source 1..709: note = XENP40556 Chain 2- 38E2[B7H3]_H2_Fab-IgG1_S239D/I332E/S364K/E357Q/K447del_(G4S )3_1D2B4[NKG2D]_H1_L1_scFv(GKPGS)4
EVQLLESGGGLVQPGGSLRLSCAVSGFSLSSYGVIWVRQAPGKGLEYVSWVSSGGSTNYASSVKGRFTISRDTSKNTVYLQMNSLRAEDTAVYFCARGATNSGTDIWGPGTLVTVSSASTKGPSVFPLAPSSKSTSGGTAALGCLVKDYFPEPVTVSWNSGALTSGVHTFPAVLQSSGLYSLSSVVTVPSSSLGTQTYICNVNHKPSNTKVDKKVEPKSCDKTHTCPPCPAPELLGGPDVFLFPPKPKDTLMISRTPEVTCVVVDVSHEDPEVKFNWYVDGVEVHNAKTKPREEQYNSTYRVVSVLTVLHQDWLNGKEYKCKVSNKALPAPEEKTISKAKGQPREPQVYTLPPSREQMTKNQVKLTCLVKGFYPSDIAVEWESNGQPENNYKTTPPVLDSDGSFFLYSKLTVDKSRWQQGNVFSCSVMHEALHNHYTQKSLSLSPGGGGGSGGGGSGGGGSEVQLLESGGGLVQPGGSLRLSCAASGFTFSSFGMSWVRQAPGKGLEWVSTISGSGSTTYYADSVKGRFTISRDNSKNTLYLQMNSLRAEDTAVYYCAKGVFSEWHYYFDYWGQGTLVTVSSGKPGSGKPGSGKPGSGKPGSDIQMTQSPSSLSASVGDRVTITCRASQSISSYLNWYQQKPGKAPKLLIYAASSLQSGVPSRFSGSGSGTDFTLTISSLQPEDFATYYCQQSYSTPYTFGQGTKLEIK

SEQ ID NO: 50 - protein, 121 aa, synthetic construct
  source 1..121: note = 1D7B4[NKG2D]_H1 L1 - Variable heavy (vh) domain
EVQLLESGGGLVQPGGSLRLSCAASGFTFSSYAMSWVRQAPGKGLEWVSSISASGGSTYYADSVKGRFTISRDNSKNTLYLQMNSLRAEDTAVYYCAKGIFSIYFFYFDYWGQGTLVTVSS

SEQ ID NO: 51 - protein, 107 aa, synthetic construct
  source 1..107: note = 1D7B4[NKG2D]_H1 L1 - Variable light (vl) domain
DIQMTQSPSSLSASVGDRVTITCRASQSISSYLNWYQQKPGKAPKLLIYAASSLQSGVPSRFSGSGSGTDFTLTISSLQPEDFATYYCQQSYSTPYTFGQGTKLEIK

SEQ ID NO: 52 - protein, 121 aa, synthetic construct
  source 1..121: note = 1D2B4[NKG2D] - Variable heavy (vh) domain
EVQLLESGGGLVQPGGSLRLSCAASGFTFSSFGMSWVRQAPGKGLEWVSTISGSGSTTYYADSVKGRFTISRDNSKNTLYLQMNSLRAEDTAVYYCAKGVFSEWHYYFDYWGQGTLVTVSS

SEQ ID NO: 53 - protein, 329 aa, synthetic construct
  source 1..329: note = 1 + 1 Fab-scFv-Fc Backbone 1 Fab-Fc Side
ASTKGPSVFPLAPSSKSTSGGTAALGCLVKDYFPEPVTVSWNSGALTSGVHTFPAVLQSSGLYSLSSVVTVPSSSLGTQTYICNVNHKPSDTKVDKKVEPKSCDKTHTCPPCPAPPVAGPSVFLFPPKPKDTLMISRTPEVTCVVVDVKHEDPEVKFNWYVDGVEVHNAKTKPREEEYNSTYRVVSVLTVLHQDWLNGKEYKCKVSNKALPAPIEKTISKAKGQPREPQVYTLPPSREEMTKNQVSLTCDVSGFYPSDIAVEWESDGQPENNYKTTPPVLDSDGSFFLYSKLTVDKSRWEQGDVFSCSVMHEALHNHYTQKSLSLSPGK

SEQ ID NO: 54 - protein, 231 aa, synthetic construct
  source 1..231: note = 1 + 1 Fab-scFv-Fc Backbone 1 scFv-Fc Side
EPKSSDKTHTCPPCPAPPVAGPSVFLFPPKPKDTLMISRTPEVTCVVVDVKHEDPEVKFNWYVDGVEVHNAKTKPREEQYNSTYRVVSVLTVLHQDWLNGKEYKCKVSNKALPAPIEKTISKAKGQPREPQVYTLPPSREQMTKNQVKLTCLVKGFYPSDIAVEWESNGQPENNYKTTPPVLDSDGSFFLYSKLTVDKSRWQQGNVFSCSVMHEALHNHYTQKSLSLSPGK

SEQ ID NO: 55 - protein, 231 aa, synthetic construct
  source 1..231: note = 1 + 1 Fab-scFv-Fc Backbone 2 scFv-Fc Side
EPKSSDKTHTCPPCPAPPVAGPSVFLFPPKPKDTLMISRTPEVTCVVVDVKHEDPEVKFNWYVDGVEVHNAKTKPREEQYNSTYRVVSVLTVLHQDWLNGKEYKCKVSNKALPAPIEKTISKAKGQPREPQVYTLPPSREEMTKNQVKLTCLVKGFYPSDIAVEWESNGQPENNYKTTPPVLDSDGSFFLYSKLTVDKSRWQQGNVFSCSVMHEALHNHYTQKSLSLSPGK

SEQ ID NO: 56 - protein, 329 aa, synthetic construct
  source 1..329: note = 1 + 1 Fab-scFv-Fc Backbone 3 Fab-Fc Side
ASTKGPSVFPLAPSSKSTSGGTAALGCLVKDYFPEPVTVSWNSGALTSGVHTFPAVLQSSGLYSLSSVVTVPSSSLGTQTYICNVNHKPSDTKVDKKVEPKSCDKTHTCPPCPAPPVAGPSVFLFPPKPKDTLMISRTPEVTCVVVDVKHEDPEVKFNWYVDGVEVHNAKTKPREEEYNSTYRVVSVLTVLHQDWLNGKEYKCKVSNKALPAPIEKTISKAKGQPREPQVYTLPPSREEMTKNQVSLTCEVSGFYPSDIAVEWESDGQPENNYKTTPPVLDSDGSFFLYSKLTVDKSRWEQGDVFSCSVMHEALHNHYTQKSLSLSPGK

SEQ ID NO: 57 - protein, 329 aa, synthetic construct
  source 1..329: note = 1 + 1 Fab-scFv-Fc Backbone 4 Fab-Fc Side
ASTKGPSVFPLAPSSKSTSGGTAALGCLVKDYFPEPVTVSWNSGALTSGVHTFPAVLQSSGLYSLSSVVTVPSSSLGTQTYICNVNHKPSDTKVDKKVEPKSCDKTHTCPPCPAPPVAGPSVFLFPPKPKDTLMISRTPEVTCVVVDVKHEDPEVKFNWYVDGVEVHNAKTKPREEEYNSTYRVVSVLTVLHQDWLNGKEYKCKVSNKALPAPIEKTISKAKGQPREPQVYTLPPSREEMTENEVSLTCLVKGFYPSDIAVEWESDGQPENNYKTTPPVLDSDGSFFLYSKLEVDKSRWEQGDVFSCSVMHEALHNHYTQKSLSLSPGK

SEQ ID NO: 58 - protein, 231 aa, synthetic construct
  source 1..231: note = 1 + 1 Fab-scFv-Fc Backbone 4 scFv-Fc Side
EPKSSDKTHTCPPCPAPPVAGPSVFLFPPKPKDTLMISRTPEVTCVVVDVKHEDPEVKFNWYVDGVEVHNAKTKPREEQYNSTYRVVSVLTVLHQDWLNGKEYKCKVSNKALPAPIEKTISKAKGQPREPQVYTLPPSREEMTKNQVSLTCLVKGFYPSDIAVEWESNGQPENNYKTTPPVLDSKGSFFLYSKLTVDKSRWQQGNVFSCSVMHEALHNHYTQKSLSLSPGK

SEQ ID NO: 59 - protein, 329 aa, synthetic construct
  source 1..329: note = 1 + 1 Fab-scFv-Fc Backbone 5 Fab-Fc Side
ASTKGPSVFPLAPSSKSTSGGTAALGCLVKDYFPEPVTVSWNSGALTSGVHTFPAVLQSSGLYSLSSVVTVPSSSLGTQTYICNVNHKPSDTKVDKKVEPKSCDKTHTCPPCPAPPVAGPSVFLFPPKPKDTLMISRTPEVTCVVVDVKHEDPEVKFNWYVDGVEVHNAKTKPREEEYNSTYRVVSVLTVLHQDWLNGKEYKCKVSNKALPAPIEKTISKAKGQPREPQVYTLPPSRDELTKNQVSLTCDVSGFYPSDIAVEWESDGQPENNYKTTPPVLDSDGSFFLYSKLTVDKSRWEQGDVFSCSVMHEALHNHYTQKSLSLSPGK

SEQ ID NO: 60 - protein, 231 aa, synthetic construct
  source 1..231: note = 1 + 1 Fab-scFv-Fc Backbone 5 scFv-Fc Side
EPKSSDKTHTCPPCPAPPVAGPSVFLFPPKPKDTLMISRTPEVTCVVVDVKHEDPEVKFNWYVDGVEVHNAKTKPREEQYNSTYRVVSVLTVLHQDWLNGKEYKCKVSNKALPAPIEKTISKAKGQPREPQVYTLPPSRDQLTKNQVKLTCLVKGFYPSDIAVEWESNGQPENNYKTTPPVLDSDGSFFLYSKLTVDKSRWQQGNVFSCSVMHEALHNHYTQKSLSLSPGK

SEQ ID NO: 61 - protein, 329 aa, synthetic construct
  source 1..329: note = 1 + 1 Fab-scFv-Fc Backbone 6 Fab-Fc Side
ASTKGPSVFPLAPSSKSTSGGTAALGCLVKDYFPEPVTVSWNSGALTSGVHTFPAVLQSSGLYSLSSVVTVPSSSLGTQTYICNVNHKPSDTKVDKKVEPKSCDKTHTCPPCPAPPVAGPSVFLFPPKPKDTLMISRTPEVTCVVVDVKHEDPEVKFNWYVDGVEVHNAKTKPREEEYASTYRVVSVLTVLHQDWLNGKEYKCKVSNKALPAPIEKTISKAKGQPREPQVYTLPPSREEMTKNQVSLTCDVSGFYPSDIAVEWESDGQPENNYKTTPPVLDSDGSFFLYSKLTVDKSRWEQGDVFSCSVMHEALHNHYTQKSLSLSPGK

SEQ ID NO: 62 - protein, 231 aa, synthetic construct
  source 1..231: note = 1 + 1 Fab-scFv-Fc Backbone 6 scFv-Fc Side
EPKSSDKTHTCPPCPAPPVAGPSVFLFPPKPKDTLMISRTPEVTCVVVDVKHEDPEVKFNWYVDGVEVHNAKTKPREEQYASTYRVVSVLTVLHQDWLNGKEYKCKVSNKALPAPIEKTISKAKGQPREPQVYTLPPSREQMTKNQVKLTCLVKGFYPSDIAVEWESNGQPENNYKTTPPVLDSDGSFFLYSKLTVDKSRWQQGNVFSCSVMHEALHNHYTQKSLSLSPGK

SEQ ID NO: 63 - protein, 329 aa, synthetic construct
  source 1..329: note = 1 + 1 Fab-scFv-Fc Backbone 7 Fab-Fc Side
ASTKGPSVFPLAPSSKSTSGGTAALGCLVKDYFPEPVTVSWNSGALTSGVHTFPAVLQSSGLYSLSSVVTVPSSSLGTQTYICNVNHKPSDTKVDKKVEPKSCDKTHTCPPCPAPPVAGPSVFLFPPKPKDTLMISRTPEVTCVVVDVKHEDPEVKFNWYVDGVEVHNAKTKPREEEYSSTYRVVSVLTVLHQDWLNGKEYKCKVSNKALPAPIEKTISKAKGQPREPQVYTLPPSREEMTKNQVSLTCDVSGFYPSDIAVEWESDGQPENNYKTTPPVLDSDGSFFLYSKLTVDKSRWEQGDVFSCSVMHEALHNHYTQKSLSLSPGK

SEQ ID NO: 64 - protein, 231 aa, synthetic construct
  source 1..231: note = 1 + 1 Fab-scFv-Fc Backbone 7 scFv-Fc Side
EPKSSDKTHTCPPCPAPPVAGPSVFLFPPKPKDTLMISRTPEVTCVVVDVKHEDPEVKFNWYVDGVEVHNAKTKPREEQYSSTYRVVSVLTVLHQDWLNGKEYKCKVSNKALPAPIEKTISKAKGQPREPQVYTLPPSREQMTKNQVKLTCLVKGFYPSDIAVEWESNGQPENNYKTTPPVLDSDGSFFLYSKLTVDKSRWQQGNVFSCSVMHEALHNHYTQKSLSLSPGK

SEQ ID NO: 65 - protein, 327 aa, synthetic construct
  source 1..327: note = 1 + 1 Fab-scFv-Fc Backbone 8 Fab-Fc Side
ASTKGPSVFPLAPCSRSTSESTAALGCLVKDYFPEPVTVSWNSGALTSGVHTFPAVLQSSGLYSLSSVVTVPSSSLGTKTYTCNVDHKPSDTKVDKRVESKYGPPCPPCPAPEFLGGPSVFLFPPKPKDTLMISRTPEVTCVVVDVSQEDPEVQFNWYVDGVEVHNAKTKPREEEFNSTYRVVSVLTVLHQDWLNGKEYKCKVSNKGLPSSIEKTISKAKGQPREPQVYTLPPSQEEMTKNQVSLTCDVSGFYPSDIAVEWESDGQPENNYKTTPPVLDSDGSFFLYSRLTVDKSRWEEGDVFSCSVMHEALHNHYTQKSLSLSLGK

SEQ ID NO: 66 - protein, 229 aa, synthetic construct
  source 1..229: note = 1 + 1 Fab-scFv-Fc Backbone 8 scFv-Fc Side
ESKYGPPCPPCPAPEFLGGPSVFLFPPKPKDTLMISRTPEVTCVVVDVSQEDPEVQFNWYVDGVEVHNAKTKPREEQFNSTYRVVSVLTVLHQDWLNGKEYKCKVSNKGLPSSIEKTISKAKGQPREPQVYTLPPSQEQMTKNQVKLTCLVKGFYPSDIAVEWESNGQPENNYKTTPPVLDSDGSFFLYSRLTVDKSRWQEGNVFSCSVMHEALHNHYTQKSLSLSLGK

SEQ ID NO: 67 - protein, 326 aa, synthetic construct
  source 1..326: note = 1 + 1 Fab-scFv-Fc Backbone 9 Fab-Fc Side
ASTKGPSVFPLAPCSRSTSESTAALGCLVKDYFPEPVTVSWNSGALTSGVHTFPAVLQSSGLYSLSSVVTVPSSNFGTQTYTCNVDHKPSDTKVDKTVERKCCVECPPCPAPPVAGPSVFLFPPKPKDTLMISRTPEVTCVVVDVSHEDPEVQFNWYVDGVEVHNAKTKPREEEFNSTFRVVSVLTVVHQDWLNGKEYKCKVSNKGLPAPIEKTISKTKGQPREPQVYTLPPSREEMTKNQVSLTCDVSGFYPSDIAVEWESDGQPENNYKTTPPMLDSDGSFFLYSKLTVDKSRWEQGDVFSCSVMHEALHNHYTQKSLSLSPGK

SEQ ID NO: 68 - protein, 228 aa, synthetic construct
  source 1..228: note = 1 + 1 Fab-scFv-Fc Backbone 9 scFv-Fc Side
ERKCCVECPPCPAPPVAGPSVFLFPPKPKDTLMISRTPEVTCVVVDVSHEDPEVQFNWYVDGVEVHNAKTKPREEQFNSTFRVVSVLTVVHQDWLNGKEYKCKVSNKGLPAPIEKTISKTKGQPREPQVYTLPPSREQMTKNQVKLTCLVKGFYPSDIAVEWESNGQPENNYKTTPPMLDSDGSFFLYSKLTVDKSRWQQGNVFSCSVMHEALHNHYTQKSLSLSPGK

SEQ ID NO: 69 - protein, 326 aa, synthetic construct
  source 1..326: note = 1 + 1 Fab-scFv-Fc Backbone 10 Fab-Fc Side
ASTKGPSVFPLAPCSRSTSESTAALGCLVKDYFPEPVTVSWNSGALTSGVHTFPAVLQSSGLYSLSSVVTVPSSNFGTQTYTCNVDHKPSDTKVDKTVERKCCVECPPCPAPPVAGPSVFLFPPKPKDTLMISRTPEVTCVVVDVKHEDPEVQFNWYVDGVEVHNAKTKPREEEFNSTFRVVSVLTVVHQDWLNGKEYKCKVSNKGLPAPIEKTISKTKGQPREPQVYTLPPSREEMTKNQVSLTCDVSGFYPSDIAVEWESDGQPENNYKTTPPMLDSDGSFFLYSKLTVDKSRWEQGDVFSCSVMHEALHNHYTQKSLSLSPGK

SEQ ID NO: 70 - protein, 228 aa, synthetic construct
  source 1..228: note = 1 + 1 Fab-scFv-Fc Backbone 10 scFv-Fc Side
ERKCCVECPPCPAPPVAGPSVFLFPPKPKDTLMISRTPEVTCVVVDVKHEDPEVQFNWYVDGVEVHNAKTKPREEQFNSTFRVVSVLTVVHQDWLNGKEYKCKVSNKGLPAPIEKTISKTKGQPREPQVYTLPPSREQMTKNQVKLTCLVKGFYPSDIAVEWESNGQPENNYKTTPPMLDSDGSFFLYSKLTVDKSRWQQGNVFSCSVMHEALHNHYTQKSLSLSPGK

SEQ ID NO: 71 - protein, 329 aa, synthetic construct
  source 1..329: note = 1 + 1 Fab-scFv-Fc Backbone 11 Fab-Fc Side
ASTKGPSVFPLAPSSKSTSGGTAALGCLVKDYFPEPVTVSWNSGALTSGVHTFPAVLQSSGLYSLSSVVTVPSSSLGTQTYICNVNHKPSDTKVDKKVEPKSCDKTHTCPPCPAPPVAGPSVFLFPPKPKDTLMISRTPEVTCVVVDVKHEDPEVKFNWYVDGVEVHNAKTKPREEEYNSTYRVVSVLTVLHQDWLNGKEYKCKVSNKALPAPIEKTISKAKGQPREPQVYTLPPSREEMTKNQVSLTCDVSGFYPSDIAVEWESDGQPENNYKTTPPVLDSDGSFFLYSKLTVDKSRWEQGDVFSCSVLHEALHSHYTQKSLSLSPGK

SEQ ID NO: 72 - protein, 231 aa, synthetic construct
  source 1..231: note = 1 + 1 Fab-scFv-Fc Backbone 11 scFv-Fc Side
EPKSSDKTHTCPPCPAPPVAGPSVFLFPPKPKDTLMISRTPEVTCVVVDVKHEDPEVKFNWYVDGVEVHNAKTKPREEQYNSTYRVVSVLTVLHQDWLNGKEYKCKVSNKALPAPIEKTISKAKGQPREPQVYTLPPSREQMTKNQVKLTCLVKGFYPSDIAVEWESNGQPENNYKTTPPVLDSDGSFFLYSKLTVDKSRWQQGNVFSCSVLHEALHSHYTQKSLSLSPGK

SEQ ID NO: 73 - protein, 329 aa, synthetic construct
  source 1..329: note = 1 + 1 Fab-scFv-Fc Backbone 12 Fab-Fc Side
ASTKGPSVFPLAPSSKSTSGGTAALGCLVKDYFPEPVTVSWNSGALTSGVHTFPAVLQSSGLYSLSSVVTVPSSSLGTQTYICNVNHKPSNTKVDKKVEPKSCDKTHTCPPCPAPPVAGPSVFLFPPKPKDTLMISRTPEVTCVVVDVKHEDPEVKFNWYVDGVEVHNAKTKPREEQYNSTYRVVSVLTVLHQDWLNGKEYKCKVSNKALPAPIEKTISKAKGQPREPQVYTLPPSREEMTKNQVSLTCDVAGFYPSDIAVEWESNGQPENNYKTTPPVLDSDGSFFLYSKLTVDKSRWQQGNVFSCSVMHEALHNHYTQKSLSLSPGK

SEQ ID NO: 74 - protein, 231 aa, synthetic construct
  source 1..231: note = 1 + 1 Fab-scFv-Fc Backbone 12 scFv-Fc Side
ERKSSDKTHTCPPRPAPPVAGPSVFLFPPKPKDTLMISRTPEVTCVVVDVKHEDPEVKFKWYVDGVEVHNAKTKPREEQYNSTYRVVSVLTVLHQDWLNGKEYKCKVSNKALPAPIEKTISKAKGQPREPQVYTLPPSREQMTKNQVKLTCLVKGFYPSDIAVEWESNGQPENNYKTTPPVLDSDGSFFLYSKLTVDKSRWQQGNVFSCSVMHEALHNHYTQKSLSLSPGK

SEQ ID NO: 75 - protein, 216 aa, synthetic construct
  source 1..216: note = 2 + 1 Fab2-scFv-Fc Backbone 1 Fab-scFv-Fc Side
APPVAGPSVFLFPPKPKDTLMISRTPEVTCVVVDVKHEDPEVKFNWYVDGVEVHNAKTKPREEQYNSTYRVVSVLTVLHQDWLNGKEYKCKVSNKALPAPIEKTISKAKGQPREPQVYTLPPSREQMTKNQVKLTCLVKGFYPSDIAVEWESNGQPENNYKTTPPVLDSDGSFFLYSKLTVDKSRWQQGNVFSCSVMHEALHNHYTQKSLSLSPGK

SEQ ID NO: 76 - protein, 216 aa, synthetic construct
  source 1..216: note = 2 + 1 Fab2-scFv-Fc Backbone 2 Fab-scFv-Fc Side
APPVAGPSVFLFPPKPKDTLMISRTPEVTCVVVDVKHEDPEVKFNWYVDGVEVHNAKTKPREEQYNSTYRVVSVLTVLHQDWLNGKEYKCKVSNKALPAPIEKTISKAKGQPREPQVYTLPPSREEMTKNQVKLTCLVKGFYPSDIAVEWESNGQPENNYKTTPPVLDSDGSFFLYSKLTVDKSRWQQGNVFSCSVMHEALHNHYTQKSLSLSPGK

SEQ ID NO: 77 - protein, 216 aa, synthetic construct
  source 1..216: note = 2 + 1 Fab2-scFv-Fc Backbone 4 Fab-scFv-Fc Side
APPVAGPSVFLFPPKPKDTLMISRTPEVTCVVVDVKHEDPEVKFNWYVDGVEVHNAKTKPREEQYNSTYRVVSVLTVLHQDWLNGKEYKCKVSNKALPAPIEKTISKAKGQPREPQVYTLPPSREEMTKNQVSLTCLVKGFYPSDIAVEWESNGQPENNYKTTPPVLDSKGSFFLYSKLTVDKSRWQQGNVFSCSVMHEALHNHYTQKSLSLSPGK

SEQ ID NO: 78 - protein, 216 aa, synthetic construct
  source 1..216: note = 2 + 1 Fab2-scFv-Fc Backbone 5 Fab-scFv-Fc Side
APPVAGPSVFLFPPKPKDTLMISRTPEVTCVVVDVKHEDPEVKFNWYVDGVEVHNAKTKPREEQYNSTYRVVSVLTVLHQDWLNGKEYKCKVSNKALPAPIEKTISKAKGQPREPQVYTLPPSRDQLTKNQVKLTCLVKGFYPSDIAVEWESNGQPENNYKTTPPVLDSDGSFFLYSKLTVDKSRWQQGNVFSCSVMHEALHNHYTQKSLSLSPGK

SEQ ID NO: 79 - protein, 216 aa, synthetic construct
  source 1..216: note = 2 + 1 Fab2-scFv-Fc Backbone 6 Fab-scFv-Fc Side
APPVAGPSVFLFPPKPKDTLMISRTPEVTCVVVDVKHEDPEVKFNWYVDGVEVHNAKTKPREEQYASTYRVVSVLTVLHQDWLNGKEYKCKVSNKALPAPIEKTISKAKGQPREPQVYTLPPSREQMTKNQVKLTCLVKGFYPSDIAVEWESNGQPENNYKTTPPVLDSDGSFFLYSKLTVDKSRWQQGNVFSCSVMHEALHNHYTQKSLSLSPGK

SEQ ID NO: 80 - protein, 216 aa, synthetic construct
  source 1..216: note = 2 + 1 Fab2-scFv-Fc Backbone 7 Fab-scFv-Fc Side
APPVAGPSVFLFPPKPKDTLMISRTPEVTCVVVDVKHEDPEVKFNWYVDGVEVHNAKTKPREEQYSSTYRVVSVLTVLHQDWLNGKEYKCKVSNKALPAPIEKTISKAKGQPREPQVYTLPPSREQMTKNQVKLTCLVKGFYPSDIAVEWESNGQPENNYKTTPPVLDSDGSFFLYSKLTVDKSRWQQGNVFSCSVMHEALHNHYTQKSLSLSPGK

SEQ ID NO: 81 - protein, 216 aa, synthetic construct
  source 1..216: note = 2 + 1 Fab2-scFv-Fc Backbone 8 Fab-scFv-Fc Side
APPVAGPSVFLFPPKPKDTLMISRTPEVTCVVVDVKHEDPEVKFNWYVDGVEVHNAKTKPREEQYNSTYRVVSVLTVLHQDWLNGKEYKCKVSNKALPAPIEKTISKAKGQPREPQVYTLPPSREQMTKNQVKLTCLVKGFYPSDIAVEWESNGQPENNYKTTPPVLDSDGSFFLYSKLTVDKSRWQQGNVFSCSVLHEALHSHYTQKSLSLSPGK

SEQ ID NO: 82 - protein, 216 aa, synthetic construct
  source 1..216: note = 2 + 1 Fab2-scFv-Fc Backbone 9 Fab-scFv-Fc Side
APPVAGPSVFLFPPKPKDTLMISRTPEVTCVVVDVKHEDPEVKFKWYVDGVEVHNAKTKPREEQYNSTYRVVSVLTVLHQDWLNGKEYKCKVSNKALPAPIEKTISKAKGQPREPQVYTLPPSREQMTKNQVKLTCLVKGFYPSDIAVEWESNGQPENNYKTTPPVLDSDGSFFLYSKLTVDKSRWQQGNVFSCSVMHEALHNHYTQKSLSLSPGK

SEQ ID NO: 83 - protein, 216 aa, synthetic construct
  source 1..216: note = 2 + 1 mAb-scFv Heterodimeric Fc Backbone 2 + 1 mAb-scFv Heterodimeric Fc Backbone monomer 1 (-)
APPVAGPSVFLFPPKPKDTLMISRTPEVTCVVVDVKHEDPEVKFNWYVDGVEVHNAKTKPREEEYNSTYRVVSVLTVLHQDWLNGKEYKCKVSNKALPAPIEKTISKAKGQPREPQVYTLPPSREEMTKNQVSLTCDVSGFYPSDIAVEWESDGQPENNYKTTPPVLDSDGSFFLYSKLTVDKSRWEQGDVFSCSVMHEALHNHYTQKSLSLSPGK

SEQ ID NO: 84 - protein, 215 aa, synthetic construct
  source 1..215: note = 2 + 1 mAb-scFv Heterodimeric Fc Backbone 2 + 1 mAb-scFv Heterodimeric Fc Backbone monomer 2 (+)
APPVAGPSVFLFPPKPKDTLMISRTPEVTCVVVDVKHEDPEVKFNWYVDGVEVHNAKTKPREEQYNSTYRVVSVLTVLHQDWLNGKEYKCKVSNKALPAPIEKTISKAKGQPREPQVYTLPPSREQMTKNQVKLTCLVKGFYPSDIAVEWESNGQPENNYKTTPPVLDSDGSFFLYSKLTVDKSRWQQGNVFSCSVMHEALHNHYTQKSLSLSPG

SEQ ID NO: 85 - protein, 107 aa, synthetic construct [sequence omitted]

SEQ ID NO: 86 - protein, 106 aa, synthetic construct
  source 1..106: note = Constant Light Domain - Lambda
GQPKAAPSVTLFPPSSEELQANKATLVCLISDFYPGAVTVAWKADSSPVKAGVETTTPSKQSNNKYAASSYLSLTPEQWKSHRSYSCQVTHEGSTVEKTVAPTECS

SEQ ID NO: 87 - protein, 15 aa, synthetic construct
  source 1..15: note = Positive Charged scFv Linkers Gly-Ser 15
GGGGSGGGGSGGGGS

SEQ ID NO: 88 - protein, 18 aa, synthetic construct
  source 1..18: note = Positive Charged scFv Linkers - Whitlow linker
GSTSGSGKPGSGEGSTKG

SEQ ID NO: 89 - protein, 14 aa, synthetic construct
  source 1..14: note = Positive Charged scFv Linkers - 6paxA_1 (+A)
IRPRAIGGSKPRVA

SEQ ID NO: 90 - protein, 15 aa, synthetic construct
  source 1..15: note = Positive Charged scFv Linkers - +B
GKGGSGKGGSGKGGS

SEQ ID NO: 91 - protein, 15 aa, synthetic construct
  source 1..15: note = Positive Charged scFv Linkers - +C
GGKGSGGKGSGGKGS

SEQ ID NO: 92 - protein, 15 aa, synthetic construct
  source 1..15: note = Positive Charged scFv Linkers - +D
GGGKSGGGKSGGGKS

SEQ ID NO: 93 - protein, 15 aa, synthetic construct
  source 1..15: note = Positive Charged scFv Linkers - +E
GKGKSGKGKSGKGKS

SEQ ID NO: 94 - protein, 15 aa, synthetic construct
  source 1..15: note = Positive Charged scFv Linkers - +F
GGGKSGGKGSGKGGS

SEQ ID NO: 95 - protein, 15 aa, synthetic construct
  source 1..15: note = Positive Charged scFv Linkers - +G
GKPGSGKPGSGKPGS

SEQ ID NO: 96 - protein, 20 aa, synthetic construct
  source 1..20: note = Positive Charged scFv Linkers - +H
GKPGSGKPGSGKPGSGKPGS

SEQ ID NO: 97 - protein, 20 aa, synthetic construct
  source 1..20: note = Positive Charged scFv Linkers - +I
GKGKSGKGKSGKGKSGKGKS

SEQ ID NO: 98 - protein, 20 aa, synthetic construct
  source 1..20: note = Negative Charged scFv Linkers - Gly-Ser 20
GGGGSGGGGSGGGGSGGGGS

SEQ ID NO: 99 - protein, 14 aa, synthetic construct
  source 1..14: note = Negative Charged scFv Linkers - 3hsc_2 (-A)
STAGDTHLGGEDFD

SEQ ID NO: 100 - protein, 15 aa, synthetic construct
  source 1..15: note = Negative Charged scFv Linkers - -B
GEGGSGEGGSGEGGS

SEQ ID NO: 101 - protein, 15 aa, synthetic construct
  source 1..15: note = Negative Charged scFv Linkers - -C
GGEGSGGEGSGGEGS

SEQ ID NO: 102 - protein, 15 aa, synthetic construct
  source 1..15: note = Negative Charged scFv Linkers - -D
GGGESGGGESGGGES

SEQ ID NO: 103 - protein, 15 aa, synthetic construct
  source 1..15: note = Negative Charged scFv Linkers - -E
GEGESGEGESGEGES

SEQ ID NO: 104 - protein, 15 aa, synthetic construct
  source 1..15: note = Negative Charged scFv Linkers - -F
GGGESGGEGSGEGGS

SEQ ID NO: 105 - protein, 20 aa, synthetic construct
  source 1..20: note = Negative Charged scFv Linkers - -G
GEGESGEGESGEGESGEGES

SEQ ID NO: 106 - protein, 19 aa, synthetic construct
  source 1..19: note = Additional scFv Linkers
PRGASKSGSASQTGSAPGS

SEQ ID NO: 107 - protein, 19 aa, synthetic construct
  source 1..19: note = Additional scFv Linkers
GTAAAGAGAAGGAAAGAAG

SEQ ID NO: 108 - protein, 19 aa, synthetic construct
  source 1..19: note = Additional scFv Linkers
GTSGSSGSGSGGSGSGGGG

SEQ ID NO: 109 - protein, 5 aa, synthetic construct
  source 1..5: note = Domain linkers - (GGGGS)1 or GGGGS
GGGGS

SEQ ID NO: 110 - protein, 10 aa, synthetic construct
  source 1..10: note = Domain linkers - (GGGGS)2
GGGGSGGGGS

SEQ ID NO: 111 - protein, 25 aa, synthetic construct
  source 1..25: note = Domain linkers - (GGGGS)5
GGGGSGGGGSGGGGSGGGGSGGGGS

SEQ ID NO: 112 - protein, 30 aa, synthetic construct
  source 1..30: note = Domain linkers - (GGGGS)6
GGGGSGGGGSGGGGSGGGGSGGGGSGGGGS

SEQ ID NO: 113 - protein, 35 aa, synthetic construct
  source 1..35: note = Domain linkers - (GGGGS)7
GGGGSGGGGSGGGGSGGGGSGGGGSGGGGSGGGGS

SEQ ID NO: 114 - protein, 5 aa, synthetic construct
  source 1..5: note = Domain linkers - (GGGGA)1 or GGGGA
GGGGA

SEQ ID NO: 115 - protein, 10 aa, synthetic construct
  source 1..10: note = Domain linkers - (GGGGA)2
GGGGAGGGGA

SEQ ID NO: 116 - protein, 15 aa, synthetic construct
  source 1..15: note = Domain linkers - (GGGGA)3
GGGGAGGGGAGGGGA

SEQ ID NO: 117 - protein, 20 aa, synthetic construct
  source 1..20: note = Domain linkers - (GGGGA)4
GGGGAGGGGAGGGGAGGGGA

SEQ ID NO: 118 - protein, 25 aa, synthetic construct
  source 1..25: note = Domain linkers - (GGGGA)5
GGGGAGGGGAGGGGAGGGGAGGGGA

SEQ ID NO: 119 - protein, 30 aa, synthetic construct
  source 1..30: note = Domain linkers - (GGGGA)6
GGGGAGGGGAGGGGAGGGGAGGGGAGGGGA

SEQ ID NO: 120 - protein, 35 aa, synthetic construct
  source 1..35: note = Domain linkers - (GGGGA)7
GGGGAGGGGAGGGGAGGGGAGGGGAGGGGAGGGGA

SEQ ID NO: 121 - protein, 30 aa, synthetic construct
  source 1..30: note = Domain linkers - 30AA-linker
DPALVHQRPAPPGGGGSGGGGSGGGGSGGG

SEQ ID NO: 122 - protein, 5 aa, synthetic construct
  source 1..5: note = Domain linkers - (GKPGS)1 or GKPGS
GKPGS

SEQ ID NO: 123 - protein, 25 aa, synthetic construct
  source 1..25: note = Domain linkers - (GKPGS)5
GKPGSGKPGSGKPGSGKPGSGKPGS

SEQ ID NO: 124 - protein, 30 aa, synthetic construct
  source 1..30: note = Domain linkers - (GKPGS)6
GKPGSGKPGSGKPGSGKPGSGKPGSGKPGS

SEQ ID NO: 125 - protein, 5 aa, synthetic construct
  source 1..5: note = Domain linkers - (GGGES)1 or GGGES
GGGES

SEQ ID NO: 126 - protein, 9 aa, synthetic construct
  source 1..9: note = Domain linkers lower half hinge
KTHTCPPCP

SEQ ID NO: 127 - protein, 15 aa, synthetic construct
  source 1..15: note = Domain linkers full hinge C220S variant
EPKSSDKTHTCPPCP

SEQ ID NO: 128 - protein, 19 aa, synthetic construct
  source 1..19: note = Domain linkers flex lower half hinge
GGGGSGGGGSKTHTCPPCP

SEQ ID NO: 129 - protein, 19 aa, synthetic construct
  source 1..19: note = Domain linkers charged lower half hinge1
GKPGSGKPGSKTHTCPPCP

SEQ ID NO: 130 - protein, 14 aa, synthetic construct
  source 1..14: note = Domain linkers charged lower half hinge2
GKPGSKTHTCPPCP

SEQ ID NO: 131 - protein, 413 aa, synthetic construct
  source 1..413: note = XENP25379 His-Avi_Fc-Tev-human NKG2D (N80-V216) human NKG2D antigen, used for phage panning
HHHHHHGGGGSGLNDIFEAQKIEWHEGGSEPKSSDKTHTCPPCPAPELLGGPSVFLFPPKPKDTLMISRTPEVTCVVVDVSHEDPEVKFNWYVDGVEVHNAKTKPREEQYNSTYRVVSVLTVLHQDWLNGKEYKCKVSNKALPAPIEKTISKAKGQPREPQVYTLPPSREEMTKNQVSLTCLVKGFYPSDIAVEWESNGQPENNYKTTPPVLDSDGSFFLYSKLTVDKSRWQQGNVFSCSVMHEALHNHYTQKSLSLSPGKGGSENLYFQGGGGGSNSLFNQEVQIPLTESYCGPCPKNWICYKNNCYQFFDESKNWYESQASCMSQNASLLKVYSKEDQDLLKLVKSYHWMGLVHIPTNGSWQWEDGSILSPNLLTIIEMQKGDCALYASSFKGYIENCSTPNTYICMQRTV

SEQ ID NO: 132 - protein, 413 aa, synthetic construct
  source 1..413: note = XENP25380 His-Avi_Fc-Tev-cyno NKG2D (N80-V216) cynomolgus NKG2D antigen, used for phage panning
HHHHHHGGGGSGLNDIFEAQKIEWHEGGSEPKSSDKTHTCPPCPAPELLGGPSVFLFPPKPKDTLMISRTPEVTCVVVDVSHEDPEVKFNWYVDGVEVHNAKTKPREEQYNSTYRVVSVLTVLHQDWLNGKEYKCKVSNKALPAPIEKTISKAKGQPREPQVYTLPPSREEMTKNQVSLTCLVKGFYPSDIAVEWESNGQPENNYKTTPPVLDSDGSFFLYSKLTVDKSRWQQGNVFSCSVMHEALHNHYTQKSLSLSPGKGGSENLYFQGGGGGSNSLFNQEVQIPLTESYCGPCPKNWICYKNNCYQFFNESKNWYESQASCMSQNASLLKVYSKEDQDLLKLVKSYHWMGLVHIPTNGSWQWEDGSILSPNLLTIIEMQKGDCALYASSFKGYIENCSIPNTYICMQRTV

SEQ ID NO: 133 - protein, 420 aa, synthetic construct
  source 1..420: note = XENP23311_His-Avi_Fc_IgG1_C220S-TEV-human NKG2D protein, used for Octet binding experiments
HHHHHHGGGGSGLNDIFEAQKIEWHEGGSEPKSSDKTHTCPPCPAPELLGGPSVFLFPPKPKDTLMISRTPEVTCVVVDVSHEDPEVKFNWYVDGVEVHNAKTKPREEQYNSTYRVVSVLTVLHQDWLNGKEYKCKVSNKALPAPIEKTISKAKGQPREPQVYTLPPSREEMTKNQVSLTCLVKGFYPSDIAVEWESNGQPENNYKTTPPVLDSDGSFFLYSKLTVDKSRWQQGNVFSCSVMHEALHNHYTQKSLSLSPGKGGSENLYFQGGGGGSIWSAVFLNSLFNQEVQIPLTESYCGPCPKNWICYKNNCYQFFDESKNWYESQASCMSQNASLLKVYSKEDQDLLKLVKSYHWMGLVHIPTNGSWQWEDGSILSPNLLTIIEMQKGDCALYASSFKGYIENCSTPNTYICMQRTV

SEQ ID NO: 134 - protein, 420 aa, synthetic construct
  source 1..420: note = XENP23309_His-Avi_Fc_IgG1_C220S-TEV-cyno NKG2D protein, used for Octet binding experiments
HHHHHHGGGGSGLNDIFEAQKIEWHEGGSEPKSSDKTHTCPPCPAPELLGGPSVFLFPPKPKDTLMISRTPEVTCVVVDVSHEDPEVKFNWYVDGVEVHNAKTKPREEQYNSTYRVVSVLTVLHQDWLNGKEYKCKVSNKALPAPIEKTISKAKGQPREPQVYTLPPSREEMTKNQVSLTCLVKGFYPSDIAVEWESNGQPENNYKTTPPVLDSDGSFFLYSKLTVDKSRWQQGNVFSCSVMHEALHNHYTQKSLSLSPGKGGSENLYFQGGGGGSIWSAVFLNSLFNQEVQIPLTESYCGPCPKNWICYKNNCYQFFNESKNWYESQASCMSQNASLLKVYSKEDQDLLKLVKSYHWMGLVHIPTNGSWQWEDGSILSPNLLTIIEMQKGDCALYASSFKGYIENCSIPNTYICMQRTV

SEQ ID NO: 135 - protein, 534 aa, Homo sapiens
  source 1..534: note = Human B7H3 sequence
MLRRRGSPGMGVHVGAALGALWFCLTGALEVQVPEDPVVALVGTDATLCCSFSPEPGFSLAQLNLIWQLTDTKQLVHSFAEGQDQGSAYANRTALFPDLLAQGNASLRLQRVRVADEGSFTCFVSIRDFGSAAVSLQVAAPYSKPSMTLEPNKDLRPGDTVTITCSSYQGYPEAEVFWQDGQGVPLTGNVTTSQMANEQGLFDVHSILRVVLGANGTYSCLVRNPVLQQDAHSSVTITPQRSPTGAVEVQVPEDPVVALVGTDATLRCSFSPEPGFSLAQLNLIWQLTDTKQLVHSFTEGRDQGSAYANRTALFPDLLAQGNASLRLQRVRVADEGSFTCFVSIRDFGSAAVSLQVAAPYSKPSMTLEPNKDLRPGDTVTITCSSYRGYPEAEVFWQDGQGVPLTGNVTTSQMANEQGLFDVHSVLRVVLGANGTYSCLVRNPVLQQDAHGSVTITGQPMTFPPEALWVTVGLSVCLIALLVALAFVCWRKIKQSCEEENAGAEDQDGEGEGSKTALQPLKHSDSKEDDGQEIA

SEQ ID NO: 136 - protein, 439 aa, Homo sapiens
  source 1..439: note = Human B7H3, extracellular domain
LEVQVPEDPVVALVGTDATSLCCSFSPEPGFSLAQLNLIWQLTDTKQLVHSFAEGQDQGSAYANRTALFPDLLAQGNASLRLQRVRVADEGSFTCFVSIRDFGSAAVSLQVAAPYSKPSMTLEPNKDLRPGDTVTITCSSYQGYPEAEVFWQDGQGVPLTGNVTTSQMANEQGLFDVHSILRVVLGANGTYSCLVRNPVLQQDAHSSVTITPQRSPTGAVEVQVPEDPVVALVGTDATLRCSFSPEPGFSLAQLNLIWQLTDTKQLVHSFTEGRDQGSAYANRTALFPDLLAQGNASLRLQRVRVADEGSFTCFVSIRDFGSAAVSLQVAAPYSKPSMTLEPNKDLRPGDTVTITCSSYRGYPEAEVFWQDGQGVPLTGNVTTSQMANEQGLFDVHSVLRVVLGANGTYSCLVRNPVLQQDAHGSVTITGQPMTFPPEA

SEQ ID NO: 137 - protein, 111 aa, Homo sapiens
  source 1..111: note = Human B7H3, V1C1 domain
LEVQVPEDPVVALVGTDATLCCSFSPEPGFSLAQLNLIWQLTDTKQLVHSFAEGQDQGSAYANRTALFPDLLAQGNASLRLQRVRVADEGSFTCFVSIRDFGSAAVSLQVA

SEQ ID NO: 138 - protein, 214 aa, Homo sapiens
  source 1..214: note = Human B7H3, V2C2 domain
PTGAVEVQVPEDPVVALVGTDATLRCSFSPEPGFSLAQLNLIWQLTDTKQLVHSFTEGRDQGSAYANRTALFPDLLAQGNASLRLQRVRVADEGSFTCFVSIRDFGSAAVSLQVAAPYSKPSMTLEPNKDLRPGDTVTITCSSYRGYPEAEVFWQDGQGVPLTGNVTTSQMANEQGLFDVHSVLRVVLGANGTYSCLVRNPVLQQDAHGSVTIT

SEQ ID NO: 139 - protein, 220 aa, Mus musculus
  source 1..220: note = Mouse B7H3, extracellular domain
VEVQVSEDPVVALVDTDATLRCSFSPEPGFSLAQLNLIWQLTDTKQLVHSFTEGRDQGSAYSNRTALFPDLLVQGNASLRLQRVRVTDEGSYTCFVSIQDFDSAAVSLQVAAPYSKPSMTLEPNKDLRPGNMVTITCSSYQGYPEAEVFWKDGQGVPLTGNVTTSQMANERGLFDVHSVLRVVLGANGTYSCLVRNPVLQQDAHGSVTITGQPLTFPPEA

SEQ ID NO: 140 - protein, 117 aa, synthetic construct
  source 1..117: note = 38E2[B7H3]_H2L1.1 Variable Heavy (VH) domain
EVQLLESGGGLVQPGGSLRLSCAVSGFSLSSYGVIWVRQAPGKGLEYVSWVSSGGSTNYASSVKGRFTISRDTSKNTVYLQMNSLRAEDTAVYFCARGATNSGTDIWGPGTLVTVSS

SEQ ID NO: 141 - protein, 110 aa, synthetic construct
  source 1..110: note = 38E2[B7H3]_H2L1.1 Variable Light (VL) domain
DIVMTQSPSSLSASVGDRVTITCRASQSINSWLSWYQQKPGKPPKLLIYGASNLASGVPSRFKGSGSGTDFTLTISSLQPEDFATYYCQNNYGIIAAGATFGGGTKVEIK

SEQ ID NO: 142 - protein, 119 aa, synthetic construct
  source 1..119: note = 2E4A3.189[B7H3]_H1L1 Variable Heavy (VH) domain
QVQLVQSGAEVKKPGASVKVSCKASGYIFTNYYMHWVRQAPGQGLEWMGIISPSAGTTSYAQKFQGRVTMTRDTSTSTVYMELSSLRSEDTAVYYCARGGGSSPRLDYWGQGTLVTVSS

SEQ ID NO: 143 - protein, 5 aa, synthetic construct
  source 1..5: note = 2E4A3.189[B7H3]_H1L1 VHCDR1
NYYMH

SEQ ID NO: 144 - protein, 17 aa, synthetic construct
  source 1..17: note = 2E4A3.189[B7H3]_H1L1 VHCDR2
IISPSAGTTSYAQKFQG

SEQ ID NO: 145 - protein, 119 aa, synthetic construct
  source 1..119: note = 2E4A3.189_H1.22 Variable Heavy (VH) domain
QVQLVQSGAEVKKPGASVKVSCKASGYIFTNNYMHWVRQAPGQGLEWMGIISPSVGRTAYAQKFQGRVTMTRDTSTSTVYMELSSLRSEDTAVYYCARGGGSSPRLDYWGQGTLVTVSS

SEQ ID NO: 146 - protein, 449 aa, synthetic construct
  source 1..449: note = XENP38571 Chain 1- 2E4A3.189[B7H3]_H1.22_IgG1_S239D/I332E Heavy Chain
QVQLVQSGAEVKKPGASVKVSCKASGYIFTNNYMHWVRQAPGQGLEWMGIISPSVGRTAYAQKFQGRVTMTRDTSTSTVYMELSSLRSEDTAVYYCARGGGSSPRLDYWGQGTLVTVSSASTKGPSVFPLAPSSKSTSGGTAALGCLVKDYFPEPVTVSWNSGALTSGVHTFPAVLQSSGLYSLSSVVTVPSSSLGTQTYICNVNHKPSNTKVDKKVEPKSCDKTHTCPPCPAPELLGGPDVFLFPPKPKDTLMISRTPEVTCVVVDVSHEDPEVKFNWYVDGVEVHNAKTKPREEQYNSTYRVVSVLTVLHQDWLNGKEYKCKVSNKALPAPEEKTISKAKGQPREPQVYTLPPSREEMTKNQVSLTCLVKGFYPSDIAVEWESNGQPENNYKTTPPVLDSDGSFFLYSKLTVDKSRWQQGNVFSCSVMHEALHNHYTQKSLSLSPGK

SEQ ID NO: 147 - protein, 330 aa, synthetic construct
  source 1..330: note = Fab-Fc side
ASTKGPSVFPLAPSSKSTSGGTAALGCLVKDYFPEPVTVSWNSGALTSGVHTFPAVLQSSGLYSLSSVVTVPSSSLGTQTYICNVNHKPSDTKVDKKVEPKSCDKTHTCPPCPAPELLGGPDVFLFPPKPKDTLMISRTPEVTCVVVDVSHEDPEVKFNWYVDGVEVHNAKTKPREEEYNSTYRVVSVLTVLHQDWLNGKEYKCKVSNKALPAPEEKTISKAKGQPREPQVYTLPPSREEMTKNQVSLTCDVSGFYPSDIAVEWESDGQPENNYKTTPPVLDSDGSFFLYSKLTVDKSRWEQGDVFSCSVMHEALHNHYTQKSLSLSPGK

SEQ ID NO: 148 - protein, 232 aa, synthetic construct
  source 1..232: note = scFv-Fc side
EPKSSDKTHTCPPCPAPELLGGPDVFLFPPKPKDTLMISRTPEVTCVVVDVSHEDPEVKFNWYVDGVEVHNAKTKPREEQYNSTYRVVSVLTVLHQDWLNGKEYKCKVSNKALPAPEEKTISKAKGQPREPQVYTLPPSREQMTKNQVKLTCLVKGFYPSDIAVEWESNGQPENNYKTTPPVLDSDGSFFLYSKLTVDKSRWQQGNVFSCSVMHEALHNHYTQKSLSLSPGK

SEQ ID NO: 149 - protein, 121 aa, synthetic construct
  source 1..121: note = m857 - Variable heavy (vh) domain
VHQVQLQQSGAEVKKPGSSVKVSCKASGGTFSSYAISWVRQAPGQGLEWMGGIIPILGIANYAQKFQGRVTITADESTSTAYMELSSLRSEDTAVYYCATGGSGSYAFDIWGQGTMVTVSS

SEQ ID NO: 150 - protein, 213 aa, synthetic construct
  source 1..213: note = XENP43715 Chain 3-6A1[B7H3]_L1_Light Chain
DIQMTQSPSSLSASVGDRVTITCRASQNIYTSLAWYQQKPGKAPKLLIYNAHSLQTGIPSRFSGSGSGADFTLTISSLQPEDFATYFCQQYYSGLTFGSGTKLEIKRTVAAPSVFIFPPSDEQLKSGTASVVCLLNNFYPREAKVQWKVDNALQSGNSQESVTEQDSKDSTYSLSSTLTLSKADYEKHKVYACEVTHQGLSSPVTKSFNRGEC

SEQ ID NO: 151 - protein, 217 aa, synthetic construct; identical to SEQ ID NO: 6
  source 1..217: note = XENP40379 Chain 3 - 38E2[B7H3]_H2_L1.1_Fab-humON72[NKG2D]_H1L1_scFv(GKPGS)4-IgG 1_pI(-)_Isosteric_A_PVA_/S267K/L368D/K370S-Fc(216)_IgG1_C22 0S/PVA_/S267K/S364K/E357Q

SEQ ID NO: 152-163 - skipped (12 entries)

SEQ ID NO: 164 - protein, 350 aa, synthetic construct
  source 1..350: note = XENP24045 Chain 1- human_IL15_D30N/E64Q/N65D_(GGGGS)1_Fc(216)_IgG1_pI(-)_Isost eric_A_C220S/PVA_/S267K/L368D/K370S
NWVNVISDLKKIEDLIQSMHIDATLYTESNVHPSCKVTAMKCFLLELQVISLESGDASIHDTVQDLIILANNSLSSNGNVTESGCKECEELEEKNIKEFLQSFVHIVQMFINTSGGGGSEPKSSDKTHTCPPCPAPPVAGPSVFLFPPKPKDTLMISRTPEVTCVVVDVKHEDPEVKFNWYVDGVEVHNAKTKPREEEYNSTYRVVSVLTVLHQDWLNGKEYKCKVSNKALPAPIEKTISKAKGQPREPQVYTLPPSREEMTKNQVSLTCDVSGFYPSDIAVEWESDGQPENNYKTTPPVLDSDGSFFLYSKLTVDKSRWEQGDVFSCSVMHEALHNHYTQKSLSLSPGK

SEQ ID NO: 165 - protein, 301 aa, synthetic construct
  source 1..301: note = XENP24045 Chain 2-human_IL15Ra(Sushi)_(GGGGS)1_Fc(216)_IgG1_C220S/PVA_/S267 K/S364K/E357Q
ITCPPPMSVEHADIWVKSYSLYSRERYICNSGFKRKAGTSSLTECVLNKATNVAHWTTPSLKCIRGGGGSEPKSSDKTHTCPPCPAPPVAGPSVFLFPPKPKDTLMISRTPEVTCVVVDVKHEDPEVKFNWYVDGVEVHNAKTKPREEQYNSTYRVVSVLTVLHQDWLNGKEYKCKVSNKALPAPIEKTISKAKGQPREPQVYTLPPSREQMTKNQVKLTCLVKGFYPSDIAVEWESNGQPENNYKTTPPVLDSDGSFFLYSKLTVDKSRWQQGNVFSCSVMHEALHNHYTQKSLSLSPGK

SEQ ID NO: 166 - protein, 547 aa, synthetic construct
  source 1..547: note = XENP27201 Chain 1- human_IL12p40_(GGGGS)2_Fc(216)_IgG1_pI(-)_Isosteric_A_C220S /PVA_/S267K/L368D/K370S
IWELKKDVYVVELDWYPDAPGEMVVLTCDTPEEDGITWTLDQSSEVLGSGKTLTIQVKEFGDAGQYTCHKGGEVLSHSLLLLHKKEDGIWSTDILKDQKEPKNKTFLRCEAKNYSGRFTCWWLTTISTDLTFSVKSSRGSSDPQGVTCGAATLSAERVRGDNKEYEYSVECQEDSACPAAEESLPIEVMVDAVHKLKYENYTSSFFIRDIIKPDPPKNLQLKPLKNSRQVEVSWEYPDTWSTPHSYFSLTFCVQVQGKSKREKKDRVFTDKTSATVICRKNASISVRAQDRYYSSSWSEWASVPCSGGGGSGGGGSEPKSSDKTHTCPPCPAPPVAGPSVFLFPPKPKDTLMISRTPEVTCVVVDVKHEDPEVKFNWYVDGVEVHNAKTKPREEEYNSTYRVVSVLTVLHQDWLNGKEYKCKVSNKALPAPIEKTISKAKGQPREPQVYTLPPSREEMTKNQVSLTCDVSGFYPSDIAVEWESDGQPENNYKTTPPVLDSDGSFFLYSKLTVDKSRWEQGDVFSCSVMHEALHNHYTQKSLSLSPGK

SEQ ID NO: 167 - protein, 438 aa, synthetic construct
  source 1..438: note = XENP27201 Chain 2-human_IL12p35_(GGGGS)2_Fc(216)_IgG1_C220S/PVA_/S267K/S364 K/E357Q
RNLPVATPDPGMFPCLHHSQNLLRAVSNMLQKARQTLEFYPCTSEEIDHEDITKDKTSTVEACLPLELTKNESCLNSRETSFITNGSCLASRKTSFMMALCLSSIYEDLKMYQVEFKTMNAKLLMDPKRQIFLDQNMLAVIDELMQALNFNSETVPQKSSLEEPDFYKTKIKLCILLHAFRIRAVTIDRVMSYLNASGGGGSGGGGSEPKSSDKTHTCPPCPAPPVAGPSVFLFPPKPKDTLMISRTPEVTCVVVDVKHEDPEVKFNWYVDGVEVHNAKTKPREEQYNSTYRVVSVLTVLHQDWLNGKEYKCKVSNKALPAPIEKTISKAKGQPREPQVYTLPPSREQMTKNQVKLTCLVKGFYPSDIAVEWESNGQPENNYKTTPPVLDSDGSFFLYSKLTVDKSRWQQGNVFSCSVMHEALHNHYTQKSLSLSPGK

SEQ ID NO: 168 - protein, 547 aa, synthetic construct
  source 1..547: note = XENP39662 Chain 1- human_IL12p40(E59K/K99Y/C252S)_(GGGGS)2- Fc(216)_IgG1_pI(-)_Isosteric_A_C220S/PVA_/S267K/L368D/K370S /M428L/N434S
IWELKKDVYVVELDWYPDAPGEMVVLTCDTPEEDGITWTLDQSSEVLGSGKTLTIQVKKFGDAGQYTCHKGGEVLSHSLLLLHKKEDGIWSTDILKDQYEPKNKTFLRCEAKNYSGRFTCWWLTTISTDLTFSVKSSRGSSDPQGVTCGAATLSAERVRGDNKEYEYSVECQEDSACPAAEESLPIEVMVDAVHKLKYENYTSSFFIRDIIKPDPPKNLQLKPLKNSRQVEVSWEYPDTWSTPHSYFSLTFSVQVQGKSKREKKDRVFTDKTSATVICRKNASISVRAQDRYYSSSWSEWASVPCSGGGGSGGGGSEPKSSDKTHTCPPCPAPPVAGPSVFLFPPKPKDTLMISRTPEVTCVVVDVKHEDPEVKFNWYVDGVEVHNAKTKPREEEYNSTYRVVSVLTVLHQDWLNGKEYKCKVSNKALPAPIEKTISKAKGQPREPQVYTLPPSREEMTKNQVSLTCDVSGFYPSDIAVEWESDGQPENNYKTTPPVLDSDGSFFLYSKLTVDKSRWEQGDVFSCSVLHEALHSHYTQKSLSLSPGK

SEQ ID NO: 169 - protein, 438 aa, synthetic construct
  source 1..438: note = XENP39662 Chain 2- human_IL12p35_(GGGGS)2- Fc(216)_IgG1_C220S/PVA_/S267K/S364K/E357Q/M428L/N434S_
RNLPVATPDPGMFPCLHHSQNLLRAVSNMLQKARQTLEFYPCTSEEIDHEDITKDKTSTVEACLPLELTKNESCLNSRETSFITNGSCLASRKTSFMMALCLSSIYEDLKMYQVEFKTMNAKLLMDPKRQIFLDQNMLAVIDELMQALNFNSETVPQKSSLEEPDFYKTKIKLCILLHAFRIRAVTIDRVMSYLNASGGGGSGGGGSEPKSSDKTHTCPPCPAPPVAGPSVFLFPPKPKDTLMISRTPEVTCVVVDVKHEDPEVKFNWYVDGVEVHNAKTKPREEQYNSTYRVVSVLTVLHQDWLNGKEYKCKVSNKALPAPIEKTISKAKGQPREPQVYTLPPSREQMTKNQVKLTCLVKGFYPSDIAVEWESNGQPENNYKTTPPVLDSDGSFFLYSKLTVDKSRWQQGNVFSCSVLHEALHSHYTQKSLSLSPGK

SEQ ID NO: 170 - protein, 450 aa, synthetic construct
  source 1..450: note = XENP38575 Chain 1- Numax[RSV]_H0L0_Fab-IgG1_pI(-)_Isosteric_A_S239D/I332E/L368 D/K370S
QVTLRESGPALVKPTQTLTLTCTFSGFSLSTAGMSVGWIRQPPGKALEWLADIWWDDKKHYNPSLKDRLTISKDTSKNQVVLKVTNMDPADTATYYCARDMIFNFYFDVWGQGTTVTVSSASTKGPSVFPLAPSSKSTSGGTAALGCLVKDYFPEPVTVSWNSGALTSGVHTFPAVLQSSGLYSLSSVVTVPSSSLGTQTYICNVNHKPSDTKVDKKVEPKSCDKTHTCPPCPAPELLGGPDVFLFPPKPKDTLMISRTPEVTCVVVDVSHEDPEVKFNWYVDGVEVHNAKTKPREEEYNSTYRVVSVLTVLHQDWLNGKEYKCKVSNKALPAPEEKTISKAKGQPREPQVYTLPPSREEMTKNQVSLTCDVSGFYPSDIAVEWESDGQPENNYKTTPPVLDSDGSFFLYSKLTVDKSRWEQGDVFSCSVMHEALHNHYTQKSLSLSPGK

SEQ ID NO: 171 - protein, 213 aa, synthetic construct
  source 1..213: note = XENP38575 Chain 3- Numax[RSV]_L0 Light Chain
DIQMTQSPSTLSASVGDRVTITCSASSRVGYMHWYQQKPGKAPKLLIYDTSKLASGVPSRFSGSGSGTEFTLTISSLQPDDFATYYCFQGSGYPFTFGGGTKVEIKRTVAAPSVFIFPPSDEQLKSGTASVVCLLNNFYPREAKVQWKVDNALQSGNSQESVTEQDSKDSTYSLSSTLTLSKADYEKHKVYACEVTHQGLSSPVTKSFNRGEC

SEQ ID NO: 172 - protein, 451 aa, synthetic construct
  source 1..451: note = XENP38600 Chain 1- LB1001[NKG2D]_H0_IgG1_pI(-)_Isosteric_A_S239D/I332E/L368D/K 370S
EVQLLESGGGLVQPGGSLRLSCAASGFTFSSYAMSWVRQAPGKGLEWVSAISGSGGSTYYADSVKGRFTISRDNSKNTLYLQMNSLRAEDTAVYYCAKDGGYYDSGAGDYWGQGTLVTVSSASTKGPSVFPLAPSSKSTSGGTAALGCLVKDYFPEPVTVSWNSGALTSGVHTFPAVLQSSGLYSLSSVVTVPSSSLGTQTYICNVNHKPSDTKVDKKVEPKSCDKTHTCPPCPAPELLGGPDVFLFPPKPKDTLMISRTPEVTCVVVDVSHEDPEVKFNWYVDGVEVHNAKTKPREEEYNSTYRVVSVLTVLHQDWLNGKEYKCKVSNKALPAPEEKTISKAKGQPREPQVYTLPPSREEMTKNQVSLTCDVSGFYPSDIAVEWESDGQPENNYKTTPPVLDSDGSFFLYSKLTVDKSRWEQGDVFSCSVMHEALHNHYTQKSLSLSPGK

SEQ ID NO: 173 - protein, 214 aa, synthetic construct
  source 1..214: note = XENP38600 Chain 3- LB1001[NKG2D]_L0 Light Chain
DIQMTQSPSSVSASVGDRVTITCRASQGIDSWLAWYQQKPGKAPKLLIYAASSLQSGVPSRFSGSGSGTDFTLTISSLQPEDFATYYCQQGVSYPRTFGGGTKVEIKRTVAAPSVFIFPPSDEQLKSGTASVVCLLNNFYPREAKVQWKVDNALQSGNSQESVTEQDSKDSTYSLSSTLTLSKADYEKHKVYACEVTHQGLSSPVTKSFNRGEC

SEQ ID NO: 174 - protein, 450 aa, synthetic construct
  source 1..450: note = XENP38595 Chain 1- Numax[RSV]_H1_IgG1_S239D/I332E Heavy Chain
QVTLRESGPALVKPTQTLTLTCTFSGFSLSTAGMSVGWIRQPPGKALEWLADIWWDDKKHYNPSLKDRLTISKDTSKNQVVLKVTNMDPADTATYYCARDMIFNFYFDVWGQGTTVTVSSASTKGPSVFPLAPSSKSTSGGTAALGCLVKDYFPEPVTVSWNSGALTSGVHTFPAVLQSSGLYSLSSVVTVPSSSLGTQTYICNVNHKPSNTKVDKKVEPKSCDKTHTCPPCPAPELLGGPDVFLFPPKPKDTLMISRTPEVTCVVVDVSHEDPEVKFNWYVDGVEVHNAKTKPREEQYNSTYRVVSVLTVLHQDWLNGKEYKCKVSNKALPAPEEKTISKAKGQPREPQVYTLPPSREEMTKNQVSLTCLVKGFYPSDIAVEWESNGQPENNYKTTPPVLDSDGSFFLYSKLTVDKSRWQQGNVFSCSVMHEALHNHYTQKSLSLSPGK

SEQ ID NO: 175 - protein, 452 aa, synthetic construct
  source 1..452: note = XENP38601 Chain 1- LB1002[NKG2D]_H0_IgG1_pI(-)_Isosteric_A_S239D/I332E/L368D/K 370S
EVQLVESGGGLVKPGGSLRLSCAASGFTFSSYSMNWVRQAPGKGLEWVSSISSSSSYIYYADSVKGRFTISRDNAKNSLYLQMNSLRAEDTAVYYCARGAPMGAAAGWFDPWGQGTLVTVSSASTKGPSVFPLAPSSKSTSGGTAALGCLVKDYFPEPVTVSWNSGALTSGVHTFPAVLQSSGLYSLSSVVTVPSSSLGTQTYICNVNHKPSDTKVDKKVEPKSCDKTHTCPPCPAPELLGGPDVFLFPPKPKDTLMISRTPEVTCVVVDVSHEDPEVKFNWYVDGVEVHNAKTKPREEEYNSTYRVVSVLTVLHQDWLNGKEYKCKVSNKALPAPEEKTISKAKGQPREPQVYTLPPSREEMTKNQVSLTCDVSGFYPSDIAVEWESDGQPENNYKTTPPVLDSDGSFFLYSKLTVDKSRWEQGDVFSCSVMHEALHNHYTQKSLSLSPGK

SEQ ID NO: 176 - protein, 214 aa, synthetic construct
  source 1..214: note = XENP38601 Chain 3- LB1002[NKG2D]_L0 Light Chain
DIQMTQSPSSVSASVGDRVTITCRASQGISSWLAWYQQKPGKAPKLLIYAASSLQSGVPSRFSGSGSGTDFTLTISSLQPEDFATYYCQQGVSFPRTFGGGTKVEIKRTVAAPSVFIFPPSDEQLKSGTASVVCLLNNFYPREAKVQWKVDNALQSGNSQESVTEQDSKDSTYSLSSTLTLSKADYEKHKVYACEVTHQGLSSPVTKSFNRGEC

SEQ ID NO: 177 - protein, 478 aa, synthetic construct
  source 1..478: note = XENP39460 Chain 2-Numax_VHVL_scFv(GKPGS)4-Fc(216)_IgG1_C220S/S239D/I332E/S3 64K/E357Q
QVTLRESGPALVKPTQTLTLTCTFSGFSLSTAGMSVGWIRQPPGKALEWLADIWWDDKKHYNPSLKDRLTISKDTSKNQVVLKVTNMDPADTATYYCARDMIFNFYFDVWGQGTTVTVSSGKPGSGKPGSGKPGSGKPGSDIQMTQSPSTLSASVGDRVTITCSASSRVGYMHWYQQKPGKAPKLLIYDTSKLASGVPSRFSGSGSGTEFTLTISSLQPDDFATYYCFQGSGYPFTFGGGTKVEIKEPKSSDKTHTCPPCPAPELLGGPDVFLFPPKPKDTLMISRTPEVTCVVVDVSHEDPEVKFNWYVDGVEVHNAKTKPREEQYNSTYRVVSVLTVLHQDWLNGKEYKCKVSNKALPAPEEKTISKAKGQPREPQVYTLPPSREQMTKNQVKLTCLVKGFYPSDIAVEWESNGQPENNYKTTPPVLDSDGSFFLYSKLTVDKSRWQQGNVFSCSVMHEALHNHYTQKSLSLSPGK

SEQ ID NO: 178 - protein, 707 aa, synthetic construct
  source 1..707: note = XENP40550 Chain 2-38E2[B7H3]_H2_Fab-IgG1_S239D/I332E/S364K/E357Q/K447del_(G 4S)3_Numax[RSV]_H1_L1_scFv(GKPGS)4
EVQLLESGGGLVQPGGSLRLSCAVSGFSLSSYGVIWVRQAPGKGLEYVSWVSSGGSTNYASSVKGRFTISRDTSKNTVYLQMNSLRAEDTAVYFCARGATNSGTDIWGPGTLVTVSSASTKGPSVFPLAPSSKSTSGGTAALGCLVKDYFPEPVTVSWNSGALTSGVHTFPAVLQSSGLYSLSSVVTVPSSSLGTQTYICNVNHKPSNTKVDKKVEPKSCDKTHTCPPCPAPELLGGPDVFLFPPKPKDTLMISRTPEVTCVVVDVSHEDPEVKFNWYVDGVEVHNAKTKPREEQYNSTYRVVSVLTVLHQDWLNGKEYKCKVSNKALPAPEEKTISKAKGQPREPQVYTLPPSREQMTKNQVKLTCLVKGFYPSDIAVEWESNGQPENNYKTTPPVLDSDGSFFLYSKLTVDKSRWQQGNVFSCSVMHEALHNHYTQKSLSLSPGGGGGSGGGGSGGGGSQVTLRESGPALVKPTQTLTLTCTFSGFSLSTAGMSVGWIRQPPGKALEWLADIWWDDKKHYNPSLKDRLTISKDTSKNQVVLKVTNMDPADTATYYCARDMIFNFYFDVWGQGTTVTVSSGKPGSGKPGSGKPGSGKPGSDIQMTQSPSTLSASVGDRVTITCSASSRVGYMHWYQQKPGKAPKLLIYDTSKLASGVPSRFSGSGSGTEFTLTISSLQPDDFATYYCFQGSGYPFTFGGGTKVEIK

SEQ ID NO: 179 - protein, 452 aa, synthetic construct
  source 1..452: note = XENP40683 Chain 1- Enoblituzumab[B7H3]_replica_H1_mAb Heavy Chain
EVQLVESGGGLVQPGGSLRLSCAASGFTFSSFGMHWVRQAPGKGLEWVAYISSDSSAIYYADTVKGRFTISRDNAKNSLYLQMNSLRDEDTAVYYCGRGRENIYYGSRLDYWGQGTTVTVSSASTKGPSVFPLAPSSKSTSGGTAALGCLVKDYFPEPVTVSWNSGALTSGVHTFPAVLQSSGLYSLSSVVTVPSSSLGTQTYICNVNHKPSNTKVDKRVEPKSCDKTHTCPPCPAPELVGGPSVFLLPPKPKDTLMISRTPEVTCVVVDVSHEDPEVKFNWYVDGVEVHNAKTKPPEEQYNSTLRVVSVLTVLHQDWLNGKEYKCKVSNKALPAPIEKTISKAKGQPREPQVYTLPPSREEMTKNQVSLTCLVKGFYPSDIAVEWESNGQPENNYKTTPLVLDSDGSFFLYSKLTVDKSRWQQGNVFSCSVMHEALHNHYTQKSLSLSPGK

SEQ ID NO: 180 - protein, 214 aa, synthetic construct
  source 1..214: note = XENP40683 Chain 2-Enoblituzumab[B7H3]_replica_L1 Light Chain
DIQLTQSPSFLSASVGDRVTITCKASQNVDTNVAWYQQKPGKAPKALIYSASYRYSGVPSRFSGSGSGTDFTLTISSLQPEDFATYYCQQYNNYPFTFGQGTKLEIKRTVAAPSVFIFPPSDEQLKSGTASVVCLLNNFYPREAKVQWKVDNALQSGNSQESVTEQDSKDSTYSLSSTLTLSKADYEKHKVYACEVTHQGLSSPVTKSFNRGEC

SEQ ID NO: 181 - protein, 7 aa, synthetic construct
  source 1..7: note = XENP39460 scFv VHCDR1
TAGMSVG

SEQ ID NO: 182 - protein, 16 aa, synthetic construct
  source 1..16: note = XENP39460 scFv VHCDR2
DIWWDDKKHYNPSLKD

SEQ ID NO: 183 - protein, 10 aa, synthetic construct
  source 1..10: note = XENP39460 scFv VHCDR3
DMIFNFYFDV

SEQ ID NO: 184 - protein, 10 aa, synthetic construct
  source 1..10: note = XENP39460 scFv VLCDR1
SASSRVGYMH

SEQ ID NO: 185 - protein, 7 aa, synthetic construct
  source 1..7: note = XENP39460 scFv VLCDR2
DTSKLAS

SEQ ID NO: 186 - protein, 9 aa, synthetic construct
  source 1..9: note = XENP39460 scFv VLCDR3
FQGSGYPFT

SEQ ID NO: 187 - protein, 17 aa, synthetic construct
  source 1..17: note = XENP38600 VHCDR2
AISGSGGSTYYADSVKG

SEQ ID NO: 188 - protein, 12 aa, synthetic construct
  source 1..12: note = XENP38600 VHCDR3
DGGYYDSGAGDY

SEQ ID NO: 189 - protein, 11 aa, synthetic construct
  source 1..11: note = XENP38600 VLCDR1
RASQGIDSWLA

SEQ ID NO: 190 - protein, 9 aa, synthetic construct
  source 1..9: note = XENP38600 VLCDR2
QQGVSYPRT

SEQ ID NO: 191 - protein, 5 aa, synthetic construct
  source 1..5: note = XENP38601 VHCDR1
SYSMN

SEQ ID NO: 192 - protein, 17 aa, synthetic construct
  source 1..17: note = XENP38601 VHCDR2
SISSSSSYIYYADSVKG

SEQ ID NO: 193 - protein, 13 aa, synthetic construct
  source 1..13: note = XENP38601 VHCDR3
GAPMGAAAGWFDP

SEQ ID NO: 194 - protein, 11 aa, synthetic construct
  source 1..11: note = XENP38601 VLCDR1
RASQGISSWLA

SEQ ID NO: 195 - protein, 9 aa, synthetic construct
  source 1..9: note = XENP38601 VLCDR3
QQGVSFPRT

SEQ ID NO: 196 - protein, 5 aa, synthetic construct
  source 1..5: note = XENP40683 VHCDR1
SFGMH

SEQ ID NO: 197 - protein, 17 aa, synthetic construct
  source 1..17: note = XENP40683 VHCDR2
YISSDSSAIYYADTVKG

SEQ ID NO: 198 - protein, 13 aa, synthetic construct
  source 1..13: note = XENP40683 VHCDR3
GRENIYYGSRLDY

SEQ ID NO: 199 - protein, 11 aa, synthetic construct
  source 1..11: note = XENP40683 VLCDR1
KASQNVDTNVA

SEQ ID NO: 200 - protein, 7 aa, synthetic construct
  source 1..7: note = XENP40683 VLCDR2
SASYRYS

SEQ ID NO: 201 - protein, 9 aa, synthetic construct
  source 1..9: note = XENP40683 VLCDR3
QQYNNYPFT

SEQ ID NO: 202 - protein, 316 aa, Mus musculus
  source 1..316: note = Mouse B7H3 sequence
MLRGWGGPSVGVCVRTALGVLCLCLTGAVEVQVSEDPVVALVDTDATLRCSFSPEPGFSLAQLNLIWQLTDTKQLVHSFTEGRDQGSAYSNRTALFPDLLVQGNASLRLQRVRVTDEGSYTCFVSIQDFDSAAVSLQVAAPYSKPSMTLEPNKDLRPGNMVTITCSSYQGYPEAEVFWKDGQGVPLTGNVTTSQMANERGLFDVHSVLRVVLGANGTYSCLVRNPVLQQDAHGSVTITGQPLTFPPEALWVTVGLSVCLVVLLVALAFVCWRKIKQSCEEENAGAEDQDGDGEGSKTALRPLKPSENKEDDGQEIA

SEQ ID NO: 203 - protein, 5 aa, synthetic construct
  source 1..5: note = Domain linkers upper half hinge
EPKSC

SEQ ID NO: 204 - protein, 15 aa, synthetic construct
  source 1..15: note = Domain linkers flex upper half hinge
EPKSCGGGGSGGGGS

SEQ ID NO: 205 - protein, 15 aa, synthetic construct
  source 1..15: note = Domain linkers charged upper half hinge1
EPKSCGKPGSGKPGS

SEQ ID NO: 206 - protein, 10 aa, synthetic construct
  source 1..10: note = Domain linkers charged upper half hinge2
EPKSCGKPGS

SEQ ID NO: 207 - protein, 216 aa, synthetic construct
  source 1..216: note = FcKO Heterodimeric Fc Backbone 3 monomer 1 (-)
APPVAGPSVFLFPPKPKDTLMISRTPEVTCVVVDVKHEDPEVKFNWYVDGVEVHNAKTKPREEEYNSTYRVVSVLTVLHQDWLNGKEYKCKVSNKALPAPIEKTISKAKGQPREPQVYTLPPSREEMTKNQVSLTCEVSGFYPSDIAVEWESDGQPENNYKTTPPVLDSDGSFFLYSKLTVDKSRWEQGDVFSCSVMHEALHNHYTQKSLSLSPGK

SEQ ID NO: 208 - protein, 216 aa, synthetic construct
  source 1..216: note = FcKO Heterodimeric Fc Backbone 4 monomer 1 (-)
APPVAGPSVFLFPPKPKDTLMISRTPEVTCVVVDVKHEDPEVKFNWYVDGVEVHNAKTKPREEEYNSTYRVVSVLTVLHQDWLNGKEYKCKVSNKALPAPIEKTISKAKGQPREPQVYTLPPSREEMTENEVSLTCLVKGFYPSDIAVEWESDGQPENNYKTTPPVLDSDGSFFLYSKLEVDKSRWEQGDVFSCSVMHEALHNHYTQKSLSLSPGK

SEQ ID NO: 209 - protein, 216 aa, synthetic construct
  source 1..216: note = FcKO Heterodimeric Fc Backbone 5 monomer 1 (-)
APPVAGPSVFLFPPKPKDTLMISRTPEVTCVVVDVKHEDPEVKFNWYVDGVEVHNAKTKPREEEYNSTYRVVSVLTVLHQDWLNGKEYKCKVSNKALPAPIEKTISKAKGQPREPQVYTLPPSRDELTKNQVSLTCDVSGFYPSDIAVEWESDGQPENNYKTTPPVLDSDGSFFLYSKLTVDKSRWEQGDVFSCSVMHEALHNHYTQKSLSLSPGK

SEQ ID NO: 210 - protein, 216 aa, synthetic construct
  source 1..216: note = FcKO Heterodimeric Fc Backbone 6 monomer 1 (-)
APPVAGPSVFLFPPKPKDTLMISRTPEVTCVVVDVKHEDPEVKFNWYVDGVEVHNAKTKPREEEYASTYRVVSVLTVLHQDWLNGKEYKCKVSNKALPAPIEKTISKAKGQPREPQVYTLPPSREEMTKNQVSLTCDVSGFYPSDIAVEWESDGQPENNYKTTPPVLDSDGSFFLYSKLTVDKSRWEQGDVFSCSVMHEALHNHYTQKSLSLSPGK

SEQ ID NO: 211 - protein, 216 aa, synthetic construct
  source 1..216: note = FcKO Heterodimeric Fc Backbone 7 monomer 1 (-)
APPVAGPSVFLFPPKPKDTLMISRTPEVTCVVVDVKHEDPEVKFNWYVDGVEVHNAKTKPREEEYSSTYRVVSVLTVLHQDWLNGKEYKCKVSNKALPAPIEKTISKAKGQPREPQVYTLPPSREEMTKNQVSLTCDVSGFYPSDIAVEWESDGQPENNYKTTPPVLDSDGSFFLYSKLTVDKSRWEQGDVFSCSVMHEALHNHYTQKSLSLSPGK

SEQ ID NO: 212 - protein, 217 aa, synthetic construct
  source 1..217: note = FcKO Heterodimeric Fc Backbone 8 monomer 1 (-)
APEFLGGPSVFLFPPKPKDTLMISRTPEVTCVVVDVSQEDPEVQFNWYVDGVEVHNAKTKPREEEFNSTYRVVSVLTVLHQDWLNGKEYKCKVSNKGLPSSIEKTISKAKGQPREPQVYTLPPSQEEMTKNQVSLTCDVSGFYPSDIAVEWESDGQPENNYKTTPPVLDSDGSFFLYSRLTVDKSRWEEGDVFSCSVMHEALHNHYTQKSLSLSLGK

SEQ ID NO: 213 - protein, 217 aa, synthetic construct
  source 1..217: note = FcKO Heterodimeric Fc Backbone 8 monomer 2 (+)
APEFLGGPSVFLFPPKPKDTLMISRTPEVTCVVVDVSQEDPEVQFNWYVDGVEVHNAKTKPREEQFNSTYRVVSVLTVLHQDWLNGKEYKCKVSNKGLPSSIEKTISKAKGQPREPQVYTLPPSQEQMTKNQVKLTCLVKGFYPSDIAVEWESNGQPENNYKTTPPVLDSDGSFFLYSRLTVDKSRWQEGNVFSCSVMHEALHNHYTQKSLSLSLGK

SEQ ID NO: 214 - protein, 216 aa, synthetic construct
  source 1..216: note = FcKO Heterodimeric Fc Backbone 9 monomer 1 (-)
APPVAGPSVFLFPPKPKDTLMISRTPEVTCVVVDVSHEDPEVQFNWYVDGVEVHNAKTKPREEEFNSTFRVVSVLTVVHQDWLNGKEYKCKVSNKGLPAPIEKTISKTKGQPREPQVYTLPPSREEMTKNQVSLTCDVSGFYPSDIAVEWESDGQPENNYKTTPPMLDSDGSFFLYSKLTVDKSRWEQGDVFSCSVMHEALHNHYTQKSLSLSPGK

SEQ ID NO: 215 - protein, 216 aa, synthetic construct
  source 1..216: note = FcKO Heterodimeric Fc Backbone 9 monomer 2 (+)
APPVAGPSVFLFPPKPKDTLMISRTPEVTCVVVDVSHEDPEVQFNWYVDGVEVHNAKTKPREEQFNSTFRVVSVLTVVHQDWLNGKEYKCKVSNKGLPAPIEKTISKTKGQPREPQVYTLPPSREQMTKNQVKLTCLVKGFYPSDIAVEWESNGQPENNYKTTPPMLDSDGSFFLYSKLTVDKSRWQQGNVFSCSVMHEALHNHYTQKSLSLSPGK

SEQ ID NO: 216 - protein, 216 aa, synthetic construct
  source 1..216: note = FcKO Heterodimeric Fc Backbone 10 monomer 1 (-)
APPVAGPSVFLFPPKPKDTLMISRTPEVTCVVVDVKHEDPEVQFNWYVDGVEVHNAKTKPREEEFNSTFRVVSVLTVVHQDWLNGKEYKCKVSNKGLPAPIEKTISKTKGQPREPQVYTLPPSREEMTKNQVSLTCDVSGFYPSDIAVEWESDGQPENNYKTTPPMLDSDGSFFLYSKLTVDKSRWEQGDVFSCSVMHEALHNHYTQKSLSLSPGK

SEQ ID NO: 217 - protein, 216 aa, synthetic construct
  source 1..216: note = FcKO Heterodimeric Fc Backbone 10 monomer 2 (+)
APPVAGPSVFLFPPKPKDTLMISRTPEVTCVVVDVKHEDPEVQFNWYVDGVEVHNAKTKPREEQFNSTFRVVSVLTVVHQDWLNGKEYKCKVSNKGLPAPIEKTISKTKGQPREPQVYTLPPSREQMTKNQVKLTCLVKGFYPSDIAVEWESNGQPENNYKTTPPMLDSDGSFFLYSKLTVDKSRWQQGNVFSCSVMHEALHNHYTQKSLSLSPGK

SEQ ID NO: 218 - protein, 216 aa, synthetic construct
  source 1..216: note = FcKO Heterodimeric Fc Backbone 11 monomer 1 (-)
APPVAGPSVFLFPPKPKDTLMISRTPEVTCVVVDVKHEDPEVKFNWYVDGVEVHNAKTKPREEEYNSTYRVVSVLTVLHQDWLNGKEYKCKVSNKALPAPIEKTISKAKGQPREPQVYTLPPSREEMTKNQVSLTCDVSGFYPSDIAVEWESDGQPENNYKTTPPVLDSDGSFFLYSKLTVDKSRWEQGDVFSCSVLHEALHSHYTQKSLSLSPGK

SEQ ID NO: 219 - protein, 216 aa, synthetic construct
  source 1..216: note = FcKO Heterodimeric Fc Backbone 13 monomer 1 (-)
APPVAGPSVFLFPPKPKDTLMISRTPEVTCVVVDVKHEDPEVKFNWYVDGVEVHNAKTKPREEEYNSTYRVVSVLTVLHQDWLNGKEYKCKVSNKALPAPIEKTISKAKGQPREPQVYTLPPSRDELTKNQVSLTCDVSGFYPSDIAVEWESDGQPENNYKTTPPVLDSDGSFFLYSKLTVDKSRWEQGDVFSCSVLHEALHSHYTQKSLSLSPGK

SEQ ID NO: 220 - protein, 216 aa, synthetic construct
  source 1..216: note = FcKO Heterodimeric Fc Backbone 13 monomer 2 (+)
APPVAGPSVFLFPPKPKDTLMISRTPEVTCVVVDVKHEDPEVKFNWYVDGVEVHNAKTKPREEQYNSTYRVVSVLTVLHQDWLNGKEYKCKVSNKALPAPIEKTISKAKGQPREPQVYTLPPSRDQLTKNQVKLTCLVKGFYPSDIAVEWESNGQPENNYKTTPPVLDSDGSFFLYSKLTVDKSRWQQGNVFSCSVLHEALHSHYTQKSLSLSPGK

SEQ ID NO: 221 - protein, 216 aa, synthetic construct
  source 1..216: note = FcKO Heterodimeric Fc Backbone 14 monomer 1 (-)
APPVAGPSVFLFPPKPKDTLMISRTPEVTCVVVDVKHEDPEVKFNWYVDGVEVHNAKTKPREEEYNSTYRVVSVLTVLHQDWLNGKEYKCKVSNKALPAPIEKTISKAKGQPREPQVYTLPPSREEMTKNQVSLTCDVSGFYPSDIAVEWESDGQPENNYKTTPPVLDSDGSFFLYSKLTVDKSRWEQGDVFSCSVLHEALHAHYTQKSLSLSPGK

SEQ ID NO: 222 - protein, 216 aa, synthetic construct
  source 1..216: note = FcKO Heterodimeric Fc Backbone 14 monomer 2 (+)
APPVAGPSVFLFPPKPKDTLMISRTPEVTCVVVDVKHEDPEVKFNWYVDGVEVHNAKTKPREEQYNSTYRVVSVLTVLHQDWLNGKEYKCKVSNKALPAPIEKTISKAKGQPREPQVYTLPPSREQMTKNQVKLTCLVKGFYPSDIAVEWESNGQPENNYKTTPPVLDSDGSFFLYSKLTVDKSRWQQGNVFSCSVLHEALHAHYTQKSLSLSPGK

SEQ ID NO: 223 - protein, 216 aa, synthetic construct
  source 1..216: note = FcKO Heterodimeric Fc Backbone 15 monomer 1 (-)
APPVAGPSVFLFPPKPKDTLMISRTPEVTCVVVDVKHEDPEVKFNWYVDGVEVHNAKTKPREEEYNSTYRVVSVLTVLHQDWLNGKEYKCKVSNKALPAPIEKTISKAKGQPREPQVYTLPPSRDELTKNQVSLTCDVSGFYPSDIAVEWESDGQPENNYKTTPPVLDSDGSFFLYSKLTVDKSRWEQGDVFSCSVLHEALHAHYTQKSLSLSPGK

SEQ ID NO: 224 - protein, 216 aa, synthetic construct
  source 1..216: note = FcKO Heterodimeric Fc Backbone 15 monomer 2 (+)
APPVAGPSVFLFPPKPKDTLMISRTPEVTCVVVDVKHEDPEVKFNWYVDGVEVHNAKTKPREEQYNSTYRVVSVLTVLHQDWLNGKEYKCKVSNKALPAPIEKTISKAKGQPREPQVYTLPPSRDQLTKNQVKLTCLVKGFYPSDIAVEWESNGQPENNYKTTPPVLDSDGSFFLYSKLTVDKSRWQQGNVFSCSVLHEALHAHYTQKSLSLSPGK

SEQ ID NO: 225 - protein, 113 aa, synthetic construct
  source 1..113: note = IgG1 CH1(+) + hinge
ASTKGPSVFPLAPSSKSTSGGTAALGCLVKDYFPEPVTVSWNSGALTSGVHTFPAVLQSSGLYSLSSVVTVPSSSLGTQTYICNVNHKPSNTKVDKKVEPKSCDKTHTCPPCP

SEQ ID NO: 226 - protein, 113 aa, synthetic construct
  source 1..113: note = IgG1 CH1(-) + hinge
ASTKGPSVFPLAPSSKSTSGGTAALGCLVKDYFPEPVTVSWNSGALTSGVHTFPAVLQSSGLYSLSSVVTVPSSSLGTQTYICNVNHKPSDTKVDKKVEPKSCDKTHTCPPCP

SEQ ID NO: 227 - protein, 110 aa, synthetic construct
  source 1..110: note = IgG2 CH1(+) + hinge
ASTKGPSVFPLAPCSRSTSESTAALGCLVKDYFPEPVTVSWNSGALTSGVHTFPAVLQSSGLYSLSSVVTVPSSNFGTQTYTCNVDHKPSNTKVDKTVERKCCVECPPCP

SEQ ID NO: 228 - protein, 110 aa, synthetic construct
  source 1..110: note = IgG2 CH1(-) + hinge
ASTKGPSVFPLAPCSRSTSESTAALGCLVKDYFPEPVTVSWNSGALTSGVHTFPAVLQSSGLYSLSSVVTVPSSNFGTQTYTCNVDHKPSDTKVDKTVERKCCVECPPCP

SEQ ID NO: 229 - protein, 110 aa, synthetic construct
  source 1..110: note = IgG4 CH1(+) + hinge
ASTKGPSVFPLAPCSRSTSESTAALGCLVKDYFPEPVTVSWNSGALTSGVHTFPAVLQSSGLYSLSSVVTVPSSSLGTKTYTCNVDHKPSNTKVDKRVESKYGPPCPSCP

SEQ ID NO: 230 - protein, 110 aa, synthetic construct
  source 1..110: note = IgG4 CH1(-) + hinge
ASTKGPSVFPLAPCSRSTSESTAALGCLVKDYFPEPVTVSWNSGALTSGVHTFPAVLQSSGLYSLSSVVTVPSSSLGTKTYTCNVDHKPSDTKVDKRVESKYGPPCPSCP

SEQ ID NO: 231 - protein, 103 aa, synthetic construct
  source 1..103: note = IgG1 CH1(+) + half hinge
ASTKGPSVFPLAPSSKSTSGGTAALGCLVKDYFPEPVTVSWNSGALTSGVHTFPAVLQSSGLYSLSSVVTVPSSSLGTQTYICNVNHKPSNTKVDKKVEPKSC

SEQ ID NO: 232 - protein, 103 aa, synthetic construct
  source 1..103: note = IgG1 CH1(-) + half hinge
ASTKGPSVFPLAPSSKSTSGGTAALGCLVKDYFPEPVTVSWNSGALTSGVHTFPAVLQSSGLYSLSSVVTVPSSSLGTQTYICNVNHKPSDTKVDKKVEPKSC

SEQ ID NO: 233 - protein, 98 aa, synthetic construct
  source 1..98: note = IgG1 CH1(+)
ASTKGPSVFPLAPSSKSTSGGTAALGCLVKDYFPEPVTVSWNSGALTSGVHTFPAVLQSSGLYSLSSVVTVPSSSLGTQTYICNVNHKPSNTKVDKKV

SEQ ID NO: 234 - protein, 98 aa, synthetic construct
  source 1..98: note = IgG1 CH1(-)
ASTKGPSVFPLAPSSKSTSGGTAALGCLVKDYFPEPVTVSWNSGALTSGVHTFPAVLQSSGLYSLSSVVTVPSSSLGTQTYICNVNHKPSDTKVDKKV

SEQ ID NO: 235 - protein, 98 aa, synthetic construct
  source 1..98: note = IgG2 CH1(+)
ASTKGPSVFPLAPCSRSTSESTAALGCLVKDYFPEPVTVSWNSGALTSGVHTFPAVLQSSGLYSLSSVVTVPSSNFGTQTYTCNVDHKPSNTKVDKTV

SEQ ID NO: 236 - protein, 98 aa, synthetic construct
  source 1..98: note = IgG2 CH1(-)
ASTKGPSVFPLAPCSRSTSESTAALGCLVKDYFPEPVTVSWNSGALTSGVHTFPAVLQSSGLYSLSSVVTVPSSNFGTQTYTCNVDHKPSDTKVDKTV

SEQ ID NO: 237 - protein, 98 aa, synthetic construct
  source 1..98: note = IgG4 CH1(+)
ASTKGPSVFPLAPCSRSTSESTAALGCLVKDYFPEPVTVSWNSGALTSGVHTFPAVLQSSGLYSLSSVVTVPSSSLGTKTYTCNVDHKPSNTKVDKRV

SEQ ID NO: 238 - protein, 98 aa, synthetic construct
  source 1..98: note = IgG4 CH1(-)
ASTKGPSVFPLAPCSRSTSESTAALGCLVKDYFPEPVTVSWNSGALTSGVHTFPAVLQSSGLYSLSSVVTVPSSSLGTKTYTCNVDHKPSDTKVDKRV

SEQ ID NO: 239 - protein, 15 aa, synthetic construct
  source 1..15: note = IgG1 hinge
EPKSCDKTHTCPPCP

SEQ ID NO: 240 - protein, 12 aa, synthetic construct
  source 1..12: note = IgG2 hinge
ERKCCVECPPCP

SEQ ID NO: 241 - protein, 12 aa, synthetic construct
  source 1..12: note = IgG4 hinge
ESKYGPPCPSCP

SEQ ID NO: 242 - protein, 121 aa, synthetic construct
  source 1..121: note = 6A1[B7H3]_H1L1 - Variable heavy (vh) domain
EVQLLESGGGLVQPGGSLRLSCAASGFTFSNYYMAWVRQAPGKGLEWVSSISTGGGSTYYRDSVKGRFTISRDNSKSTLYLQMNSLRAEDTAVYYCTTDLSAIAATPFAYWGQGTLVTVSS

SEQ ID NO: 243 - protein, 5 aa, synthetic construct
  source 1..5: note = 6A1[B7H3]_H1L1 - vhCDR1
NYYMA

SEQ ID NO: 244 - protein, 17 aa, synthetic construct
  source 1..17: note = 6A1[B7H3]_H1L1 - vhCDR2
SISTGGGSTYYRDSVKG

SEQ ID NO: 245 - protein, 12 aa, synthetic construct
  source 1..12: note = 6A1[B7H3]_H1L1 - vhCDR3
DLSAIAATPFAY

SEQ ID NO: 246 - protein, 106 aa, synthetic construct
  source 1..106: note = 6A1[B7H3]_H1L1 - Variable light (vl) domain
DIQMTQSPSSLSASVGDRVTITCRASQNIYTSLAWYQQKPGKAPKLLIYNAHSLQTGIPSRFSGSGSGADFTLTISSLQPEDFATYFCQQYYSGLTFGSGTKLEIK

SEQ ID NO: 247 - protein, 11 aa, synthetic construct
  source 1..11: note = 6A1[B7H3]_H1L1 - vlCDR1
RASQNIYTSLA

SEQ ID NO: 248 - protein, 7 aa, synthetic construct
  source 1..7: note = 6A1[B7H3]_H1L1 - vlCDR2
NAHSLQT

SEQ ID NO: 249 - protein, 8 aa, synthetic construct
  source 1..8: note = 6A1[B7H3]_H1L1 - vlCDR3
QQYYSGLT

SEQ ID NO: 250 - protein, 119 aa, synthetic construct
  source 1..119: note = 3C4[B7H3]_H1L1.1 - Variable heavy (vh) domain
QVQLVQSGAEVKKPGASVKVSCKVSGFSLTSYHVSWVRQAPGQGLEWMGAISSGGSSYYNSKFQGRVTMTRDTSTSTVYMELSSLRSEDTAVYFCTGDLGAAISWFAYWGQGTLVTVSS

SEQ ID NO: 251 - protein, 10 aa, synthetic construct
  source 1..10: note = 3C4[B7H3]_H1L1.1 - vhCDR1
GFSLTSYHVS

SEQ ID NO: 252 - protein, 16 aa, synthetic construct
  source 1..16: note = 3C4[B7H3]_H1L1.1 - vhCDR2
AISSGGSSYYNSKFQG

SEQ ID NO: 253 - protein, 11 aa, synthetic construct
  source 1..11: note = 3C4[B7H3]_H1L1.1 - vhCDR3
DLGAAISWFAY

SEQ ID NO: 254 - protein, 106 aa, synthetic construct
  source 1..106: note = 3C4[B7H3]_H1L1.1 - Variable light (vl) domain
DIQMTQSPSSLSASVGDRVTITCRTSQSIYKSLAWYQQKPGKAPKLLIYNAHSLQTGIPSRFSGSGSGTDFTLTISSLQPEDFATYFCQQYYSGLTFGSGTKLEIK

SEQ ID NO: 255 - protein, 11 aa, synthetic construct
  source 1..11: note = 3C4[B7H3]_H1L1.1 - vlCDR1
RTSQSIYKSLA

SEQ ID NO: 256 - protein, 7 aa, synthetic construct
  source 1..7: note = 3C4[B7H3]_H1L1.1 - vlCDR2
NAHSLQT

SEQ ID NO: 257 - protein, 8 aa, synthetic construct
  source 1..8: note = 3C4[B7H3]_H1L1.1 - vlCDR3
QQYYSGLT

SEQ ID NO: 258 - protein, 122 aa, synthetic construct
  source 1..122: note = 4F12[B7H3]_H2L1.1 - Variable heavy (vh) domain
EVQLVESGGGLVKPGGSLRLSCAASGFSFSVGYYMCWVRQAPGKGLEWVSCIYVGSGSSGSTYYASVKGRFTISSDTAKTSVYLQMNSLRAEDTAVYFCARTAGSDWRLDLWGQGTLVTVSS

SEQ ID NO: 259 - protein, 6 aa, synthetic construct
  source 1..6: note = 4F12[B7H3]_H2L1.1 - vhCDR1
VGYYMC

SEQ ID NO: 260 - protein, 19 aa, synthetic construct
  source 1..19: note = 4F12[B7H3]_H2L1.1 - vhCDR2
CIYVGSGSSGSTYYASVKG

SEQ ID NO: 261 - protein, 10 aa, synthetic construct
  source 1..10: note = 4F12[B7H3]_H2L1.1 - vhCDR3
TAGSDWRLDL

SEQ ID NO: 262 - protein, 108 aa, synthetic construct
  source 1..108: note = 4F12[B7H3]_H2L1.1 - Variable light (vl) domain
DIVMTQSPSSLSASVGDRVTITCRASQSIANELSWYQQKPGKPPKLLIYRASTLTSGVPSRFKGSGSGTDFTLTISSLQPEDFATYYCQSTYNGRAIGFGGGTKVEIK

SEQ ID NO: 263 - protein, 11 aa, synthetic construct
  source 1..11: note = 4F12[B7H3]_H2L1.1 - vlCDR1
RASQSIANELS

SEQ ID NO: 264 - protein, 7 aa, synthetic construct
  source 1..7: note = 4F12[B7H3]_H2L1.1 - vlCDR2
RASTLTS

SEQ ID NO: 265 - protein, 10 aa, synthetic construct
  source 1..10: note = 4F12[B7H3]_H2L1.1 - vlCDR3
QSTYNGRAIG

SEQ ID NO: 266 - protein, 117 aa, synthetic construct; identical to SEQ ID NO: 140
  source 1..117: note = 38E2[B7H3]_H2L1.1 - Variable heavy (vh) domain

SEQ ID NO: 267 - protein, 5 aa, synthetic construct
  source 1..5: note = 38E2[B7H3]_H2L1.1 - vhCDR1
SYGVI

SEQ ID NO: 268 - protein, 16 aa, synthetic construct
  source 1..16: note = 38E2[B7H3]_H2L1.1 - vhCDR2
WVSSGGSTNYASSVKG

SEQ ID NO: 269 - protein, 9 aa, synthetic construct
  source 1..9: note = 38E2[B7H3]_H2L1.1 - vhCDR3
GATNSGTDI

SEQ ID NO: 270 - protein, 110 aa, synthetic construct; identical to SEQ ID NO: 141
  source 1..110: note = 38E2[B7H3]_H2L1.1 - Variable light (vl) domain

SEQ ID NO: 271 - protein, 11 aa, synthetic construct
  source 1..11: note = 38E2[B7H3]_H2L1.1 - vlCDR1
RASQSINSWLS

SEQ ID NO: 272 - protein, 7 aa, synthetic construct
  source 1..7: note = 38E2[B7H3]_H2L1.1 - vlCDR2
GASNLAS

SEQ ID NO: 273 - protein, 12 aa, synthetic construct
  source 1..12: note = 38E2[B7H3]_H2L1.1 - vlCDR3
QNNYGIIAAGAT

SEQ ID NO: 274 - protein, 119 aa, synthetic construct; identical to SEQ ID NO: 142
  source 1..119: note = 2E4A3.189[B7H3]_H1L1 - Variable heavy (vh) domain

SEQ ID NO: 275 - protein, 5 aa, synthetic construct
  source 1..5: note = 2E4A3.189[B7H3]_H1L1 - vhCDR1
NYYMH

SEQ ID NO: 276 - protein, 17 aa, synthetic construct
  source 1..17: note = 2E4A3.189[B7H3]_H1L1 - vhCDR2
IISPSAGTTSYAQKFQG

SEQ ID NO: 277 - protein, 10 aa, synthetic construct
  source 1..10: note = 2E4A3.189[B7H3]_H1L1 - vhCDR3
GGGSSPRLDY

SEQ ID NO: 278 - protein, 107 aa, synthetic construct; identical to SEQ ID NO: 51
  source 1..107: note = 2E4A3.189[B7H3]_H1L1 - Variable light (vl) domain

SEQ ID NO: 279 - protein, 11 aa, synthetic construct
  source 1..11: note = 2E4A3.189[B7H3]_H1L1 - vlCDR1
RASQSISSYLN

SEQ ID NO: 280 - protein, 7 aa, synthetic construct
  source 1..7: note = 2E4A3.189[B7H3]_H1L1 - vlCDR2
AASSLQS

SEQ ID NO: 281 - protein, 9 aa, synthetic construct
  source 1..9: note = 2E4A3.189[B7H3]_H1L1 - vlCDR3
QQSYSTPYT

SEQ ID NO: 282 - protein, 119 aa, synthetic construct
  source 1..119: note = 2E4A3.189[B7H3]_H1.1
QVQLVQSGAEVKKPGASVKVSCKASGYTFTNNYMHWVRQAPGQGLEWMGIISPSSGRTSYAQKFQGRVTMTRDTSTSTVYMELSSLRSEDTAVYYCARGGGSSPRLDYWGQGTLVTVSS

SEQ ID NO: 283 - protein, 119 aa, synthetic construct
  source 1..119: note = 2E4A3.189[B7H3]_H1.2
QVQLVQSGAEVKKPGASVKVSCKASGYTFTDHYMHWVRQAPGQGLEWMGIISPSSGRTSYAQKFQGRVTMTRDTSTSTVYMELSSLRSEDTAVYYCARGGGSSPRLDYWGQGTLVTVSS

SEQ ID NO: 284 - protein, 119 aa, synthetic construct
  source 1..119: note = 2E4A3.189[B7H3]_H1.3
QVQLVQSGAEVKKPGASVKVSCKASGYIFTNHYMHWVRQAPGQGLEWMGIISPSAGSTDYAQKFQGRVTMTRDTSTSTVYMELSSLRSEDTAVYYCARGGGSSPRLDYWGQGTLVTVSS

SEQ ID NO: 285 - protein, 119 aa, synthetic construct
  source 1..119: note = 2E4A3.189[B7H3]_H1.4
QVQLVQSGAEVKKPGASVKVSCKASGYPFTNHYMHWVRQAPGQGLEWMGIISPSVGTTSYAQKFQGRVTMTRDTSTSTVYMELSSLRSEDTAVYYCARGGGSSPRLDYWGQGTLVTVSS

SEQ ID NO: 286 - protein, 119 aa, synthetic construct
  source 1..119: note = 2E4A3.189[B7H3]_H1.5
QVQLVQSGAEVKKPGASVKVSCKASGYTFTDHYMHWVRQAPGQGLEWMGIISPSAGSTSYAQKFQGRVTMTRDTSTSTVYMELSSLRSEDTAVYYCARGGGSSPRLDYWGQGTLVTVSS

SEQ ID NO: 287 - protein, 119 aa, synthetic construct
  source 1..119: note = 2E4A3.189[B7H3]_H1.6
QVQLVQSGAEVKKPGASVKVSCKASGYIFTDYYMHWVRQAPGQGLEWMGIISPSGGSTDYAQKFQGRVTMTRDTSTSTVYMELSSLRSEDTAVYYCARGGGSSPRLDYWGQGTLVTVSS

SEQ ID NO: 288 - protein, 119 aa, synthetic construct
  source 1..119: note = 2E4A3.189[B7H3]_H1.7
QVQLVQSGAEVKKPGASVKVSCKASGYTFTQNYMHWVRQAPGQGLEWMGIISPSAGSTAYAQKFQGRVTMTRDTSTSTVYMELSSLRSEDTAVYYCARGGGSSPRLDYWGQGTLVTVSS

SEQ ID NO: 289 - protein, 119 aa, synthetic construct
  source 1..119: note = 2E4A3.189[B7H3]_H1.8
QVQLVQSGAEVKKPGASVKVSCKASGYTFTDNYMHWVRQAPGQGLEWMGIISPSAGSTNYAQKFQGRVTMTRDTSTSTVYMELSSLRSEDTAVYYCARGGGSSPRLDYWGQGTLVTVSS

SEQ ID NO: 290 - protein, 119 aa, synthetic construct
  source 1..119: note = 2E4A3.189[B7H3]_H1.9
QVQLVQSGAEVKKPGASVKVSCKASGYTFTDNYMHWVRQAPGQGLEWMGIISPSAGSTIYAQKFQGRVTMTRDTSTSTVYMELSSLRSEDTAVYYCARGGGSSPRLDYWGQGTLVTVSS

SEQ ID NO: 291 - protein, 119 aa, synthetic construct
  source 1..119: note = 2E4A3.189[B7H3]_H1.10
QVQLVQSGAEVKKPGASVKVSCKASGYTFTNHYMHWVRQAPGQGLEWMGIISPSVGSTSYAQKFQGRVTMTRDTSTSTVYMELSSLRSEDTAVYYCARGGGSSPRLDYWGQGTLVTVSS

SEQ ID NO: 292 - protein, 119 aa, synthetic construct
  source 1..119: note = 2E4A3.189[B7H3]_H1.11
QVQLVQSGAEVKKPGASVKVSCKASGYTFIDFYMHWVRQAPGQGLEWMGIISPSGGSTDYAQKFQGRVTMTRDTSTSTVYMELSSLRSEDTAVYYCARGGGSSPRLDYWGQGTLVTVSS

SEQ ID NO: 293 - protein, 119 aa, synthetic construct
  source 1..119: note = 2E4A3.189[B7H3]_H1.12
QVQLVQSGAEVKKPGASVKVSCKASGYTFTNHYMHWVRQAPGQGLEWMGIISPSVGTTSYAQKFQGRVTMTRDTSTSTVYMELSSLRSEDTAVYYCARGGGSSPRLDYWGQGTLVTVSS

SEQ ID NO: 294 - protein, 119 aa, synthetic construct
  source 1..119: note = 2E4A3.189[B7H3]_H1.13
QVQLVQSGAEVKKPGASVKVSCKASGYPFTDHYMHWVRQAPGQGLEWMGIISPSAGSTSYAQKFQGRVTMTRDTSTSTVYMELSSLRSEDTAVYYCARGGGSSPRLDYWGQGTLVTVSS

SEQ ID NO: 295 - protein, 119 aa, synthetic construct
  source 1..119: note = 2E4A3.189[B7H3]_H1.14
QVQLVQSGAEVKKPGASVKVSCKASGYTFTENYMHWVRQAPGQGLEWMGIISPSAGTTSYAQKFQGRVTMTRDTSTSTVYMELSSLRSEDTAVYYCARGGGSSPRLDYWGQGTLVTVSS

SEQ ID NO: 296 - protein, 119 aa, synthetic construct
  source 1..119: note = 2E4A3.189[B7H3]_H1.15
QVQLVQSGAEVKKPGASVKVSCKASGYTFINHYMHWVRQAPGQGLEWMGIISPSAGSTNYAQKFQGRVTMTRDTSTSTVYMELSSLRSEDTAVYYCARGGGSSPRLDYWGQGTLVTVSS

SEQ ID NO: 297 - protein, 119 aa, synthetic construct
  source 1..119: note = 2E4A3.189[B7H3]_H1.16
QVQLVQSGAEVKKPGASVKVSCKASGYTFTEFYMHWVRQAPGQGLEWMGIISPSGGSTDYAQKFQGRVTMTRDTSTSTVYMELSSLRSEDTAVYYCARGGGSSPRLDYWGQGTLVTVSS

SEQ ID NO: 298 - protein, 119 aa, synthetic construct
  source 1..119: note = 2E4A3.189[B7H3]_H1.17
QVQLVQSGAEVKKPGASVKVSCKASGYTFTDNYMHWVRQAPGQGLEWMGIISPSAGSTAYAQKFQGRVTMTRDTSTSTVYMELSSLRSEDTAVYYCARGGGSSPRLDYWGQGTLVTVSS

SEQ ID NO: 299 - protein, 119 aa, synthetic construct
  source 1..119: note = 2E4A3.189[B7H3]_H1.18
QVQLVQSGAEVKKPGASVKVSCKASGYIFTNHYMHWVRQAPGQGLEWMGIISPSVGTTSYAQKFQGRVTMTRDTSTSTVYMELSSLRSEDTAVYYCARGGGSSPRLDYWGQGTLVTVSS

SEQ ID NO: 300 - protein, 119 aa, synthetic construct
  source 1..119: note = 2E4A3.189[B7H3]_H1.19
QVQLVQSGAEVKKPGASVKVSCKASGYTFINNYMHWVRQAPGQGLEWMGIISPSAGSTAYAQKFQGRVTMTRDTSTSTVYMELSSLRSEDTAVYYCARGGGSSPRLDYWGQGTLVTVSS

SEQ ID NO: 301 - protein, 119 aa, synthetic construct
  source 1..119: note = 2E4A3.189[B7H3]_H1.20
QVQLVQSGAEVKKPGASVKVSCKASGYIFTNNYMHWVRQAPGQGLEWMGIISPSVGRTSYAQKFQGRVTMTRDTSTSTVYMELSSLRSEDTAVYYCARGGGSSPRLDYWGQGTLVTVSS

SEQ ID NO: 302 - protein, 119 aa, synthetic construct
  source 1..119: note = 2E4A3.189[B7H3]_H1.21
QVQLVQSGAEVKKPGASVKVSCKASGYAFTDNYMHWVRQAPGQGLEWMGIISPSAGSTAYAQKFQGRVTMTRDTSTSTVYMELSSLRSEDTAVYYCARGGGSSPRLDYWGQGTLVTVSS

SEQ ID NO: 303 - protein, 119 aa, synthetic construct; identical to SEQ ID NO: 145
  source 1..119: note = 2E4A3.189[B7H3]_H1.22 - Variable heavy (vh) domain 2E4A3.189_H1.22

SEQ ID NO: 304 - protein, 119 aa, synthetic construct
  source 1..119: note = 2E4A3.189[B7H3]_H1.23
QVQLVQSGAEVKKPGASVKVSCKASGYAFTNHYMHWVRQAPGQGLEWMGIISPSVGTTSYAQKFQGRVTMTRDTSTSTVYMELSSLRSEDTAVYYCARGGGSSPRLDYWGQGTLVTVSS

SEQ ID NO: 305 - protein, 119 aa, synthetic construct
  source 1..119: note = 2E4A3.189[B7H3]_H1.24
QVQLVQSGAEVKKPGASVKVSCKASGYIFTDNYMHWVRQAPGQGLEWMGIISPSGGSTAYAQKFQGRVTMTRDTSTSTVYMELSSLRSEDTAVYYCARGGGSSPRLDYWGQGTLVTVSS

SEQ ID NO: 306 - protein, 119 aa, synthetic construct
  source 1..119: note = 2E4A3.189[B7H3]_H1.25
QVQLVQSGAEVKKPGASVKVSCKASGYAFTDNYMHWVRQAPGQGLEWMGIISPSAGSTDYAQKFQGRVTMTRDTSTSTVYMELSSLRSEDTAVYYCARGGGSSPRLDYWGQGTLVTVSS

SEQ ID NO: 307 - protein, 119 aa, synthetic construct
  source 1..119: note = 2E4A3.189[B7H3]_H1.26
QVQLVQSGAEVKKPGASVKVSCKASGYIFTNNYMHWVRQAPGQGLEWMGIISPSVGTTSYAQKFQGRVTMTRDTSTSTVYMELSSLRSEDTAVYYCARGGGSSPRLDYWGQGTLVTVSS

SEQ ID NO: 308 - protein, 119 aa, synthetic construct
  source 1..119: note = 2E4A3.189[B7H3]_H1.27
QVQLVQSGAEVKKPGASVKVSCKASGYAFTNNYMHWVRQAPGQGLEWMGIISPSVGTTSYAQKFQGRVTMTRDTSTSTVYMELSSLRSEDTAVYYCARGGGSSPRLDYWGQGTLVTVSS

SEQ ID NO: 309 - protein, 119 aa, synthetic construct
  source 1..119: note = 2E4A3.189[B7H3]_H1.28
QVQLVQSGAEVKKPGASVKVSCKASGYSFTDNYMHWVRQAPGQGLEWMGIISPSAGSTAYAQKFQGRVTMTRDTSTSTVYMELSSLRSEDTAVYYCARGGGSSPRLDYWGQGTLVTVSS

SEQ ID NO: 310 - protein, 119 aa, synthetic construct
  source 1..119: note = 2E4A3.189[B7H3]_H1.29
QVQLVQSGAEVKKPGASVKVSCKASGYAFTNHYMHWVRQAPGQGLEWMGIISPSAGSTAYAQKFQGRVTMTRDTSTSTVYMELSSLRSEDTAVYYCARGGGSSPRLDYWGQGTLVTVSS

SEQ ID NO: 311 - protein, 119 aa, synthetic construct
  source 1..119: note = 2E4A3.189[B7H3]_H1.30
QVQLVQSGAEVKKPGASVKVSCKASGYTFTNNYMHWVRQAPGQGLEWMGIISPSAGSTAYAQKFQGRVTMTRDTSTSTVYMELSSLRSEDTAVYYCARGGGSSPRLDYWGQGTLVTVSS

SEQ ID NO: 312 - protein, 119 aa, synthetic construct
  source 1..119: note = 2E4A3.189[B7H3]_H1.31
QVQLVQSGAEVKKPGASVKVSCKASGYTFINNYMHWVRQAPGQGLEWMGIISPSGGSTAYAQKFQGRVTMTRDTSTSTVYMELSSLRSEDTAVYYCARGGGSSPRLDYWGQGTLVTVSS

SEQ ID NO: 313 - protein, 119 aa, synthetic construct
  source 1..119: note = 2E4A3.189[B7H3]_H1.32
QVQLVQSGAEVKKPGASVKVSCKASGYSFTNNYMHWVRQAPGQGLEWMGIISPSTGRTSYAQKFQGRVTMTRDTSTSTVYMELSSLRSEDTAVYYCARGGGSSPRLDYWGQGTLVTVSS

SEQ ID NO: 314 - protein, 119 aa, synthetic construct
  source 1..119: note = 2E4A3.189[B7H3]_H1.33
QVQLVQSGAEVKKPGASVKVSCKASGYTFTDNYMHWVRQAPGQGLEWMGIISPSVGTTSYAQKFQGRVTMTRDTSTSTVYMELSSLRSEDTAVYYCARGGGSSPRLDYWGQGTLVTVSS

SEQ ID NO: 315 - protein, 119 aa, synthetic construct
  source 1..119: note = 2E4A3.189[B7H3]_H1.34
QVQLVQSGAEVKKPGASVKVSCKASGYTFTDNYMHWVRQAPGQGLEWMGIISPSGGSTAYAQKFQGRVTMTRDTSTSTVYMELSSLRSEDTAVYYCARGGGSSPRLDYWGQGTLVTVSS

SEQ ID NO: 316 - protein, 119 aa, synthetic construct
  source 1..119: note = 2E4A3.189[B7H3]_H1.35
QVQLVQSGAEVKKPGASVKVSCKASGYTFTDNYMHWVRQAPGQGLEWMGIISPSVGTTAYAQKFQGRVTMTRDTSTSTVYMELSSLRSEDTAVYYCARGGGSSPRLDYWGQGTLVTVSS

SEQ ID NO: 317 - protein, 119 aa, synthetic construct
  source 1..119: note = 2E4A3.189[B7H3]_H1.36
QVQLVQSGAEVKKPGASVKVSCKASGYPFINHYMHWVRQAPGQGLEWMGIISPSSGRTAYAQKFQGRVTMTRDTSTSTVYMELSSLRSEDTAVYYCARGGGSSPRLDYWGQGTLVTVSS

SEQ ID NO: 318 - protein, 119 aa, synthetic construct
  source 1..119: note = 2E4A3.189[B7H3]_H1.37
QVQLVQSGAEVKKPGASVKVSCKASGYTFTNHYMHWVRQAPGQGLEWMGIISPSAGSTAYAQKFQGRVTMTRDTSTSTVYMELSSLRSEDTAVYYCARGGGSSPRLDYWGQGTLVTVSS

SEQ ID NO: 319 - protein, 119 aa, synthetic construct
  source 1..119: note = 2E4A3.189[B7H3]_H1.38
QVQLVQSGAEVKKPGASVKVSCKASGYSFTNHYMHWVRQAPGQGLEWMGIISPSVGRTSYAQKFQGRVTMTRDTSTSTVYMELSSLRSEDTAVYYCARGGGSSPRLDYWGQGTLVTVSS

SEQ ID NO: 320 - protein, 119 aa, synthetic construct
  source 1..119: note = 2E4A3.189[B7H3]_H1.39
QVQLVQSGAEVKKPGASVKVSCKASGYTFINHYMHWVRQAPGQGLEWMGIISPSAGSTAYAQKFQGRVTMTRDTSTSTVYMELSSLRSEDTAVYYCARGGGSSPRLDYWGQGTLVTVSS

SEQ ID NO: 321 - protein, 119 aa, synthetic construct
  source 1..119: note = 2E4A3.189[B7H3]_H1.40
QVQLVQSGAEVKKPGASVKVSCKASGYSFTDNYMHWVRQAPGQGLEWMGIISPSGGSTAYAQKFQGRFTMTRDTSTSTVYMELSSLRSEDTAVYYCARGGGSSPRLDYWGQGTLVTVSS

SEQ ID NO: 322 - protein, 119 aa, synthetic construct
  source 1..119: note = 2E4A3.189[B7H3]_H1.41
QVQLVQSGAEVKKPGASVKVSCKASGYIFTDNYMHWVRQAPGQGLEWMGIISPSAGSTAYAQKFQGRVTMTRDTSTSTVYMELSSLRSEDTAVYYCARGGGSSPRLDYWGQGTLVTVSS

SEQ ID NO: 323 - protein, 119 aa, synthetic construct
  source 1..119: note = 2E4A3.189[B7H3]_H1.42
QVQLVQSGAEVKKPGASVKVSCKASGYTFIDNYMHWVRQAPGQGLEWMGIISPSVGTTSYAQKFQGRVTMTRDTSTSTVYMELSSLRSEDTAVYYCARGGGSSPRLDYWGQGTLVTVSS

SEQ ID NO: 324 - protein, 119 aa, synthetic construct
  source 1..119: note = 2E4A3.189[B7H3]_H1.43
QVQLVQSGAEVKKPGASVKVSCKASGYSFTDNYMHWVRQAPGQGLEWMGIISPSSGRTSYAQKFQGRVTMTRDTSTSTVYMELSSLRSEDTAVYYCARGGGSSPRLDYWGQGTLVTVSS

SEQ ID NO: 325 - protein, 119 aa, synthetic construct
  source 1..119: note = 2E4A3.189[B7H3]_H1.44
QVQLVQSGAEVKKPGASVKVSCKASGYIFTNNYMHWVRQAPGQGLEWMGIISPSAGTTSYAQKFQGRVTMTRDTSTSTVYMELSSLRSEDTAVYYCARGGGSSPRLDYWGQGTLVTVSS

SEQ ID NO: 326 - protein, 119 aa, synthetic construct
  source 1..119: note = 2E4A3.189[B7H3]_H1.45
QVQLVQSGAEVKKPGASVKVSCKASGYAFTDNYMHWVRQAPGQGLEWMGIISPSVGTTSYAQKFQGRVTMTRDTSTSTVYMELSSLRSEDTAVYYCARGGGSSPRLDYWGQGTLVTVSS

SEQ ID NO: 327 - protein, 119 aa, synthetic construct
  source 1..119: note = 2E4A3.189[B7H3]_H1.46
QVQLVQSGAEVKKPGASVKVSCKASGYSFTNNYMHWVRQAPGQGLEWMGIISPSVGTTSYAQKFQGRVTMTRDTSTSTVYMELSSLRSEDTAVYYCARGGGSSPRLDYWGQGTLVTVSS

SEQ ID NO: 328 - protein, 119 aa, synthetic construct
  source 1..119: note = 2E4A3.189[B7H3]_H1.47
QVQLVQSGAEVKKPGASVKVSCKASGYIFTDHYMHWVRQAPGQGLEWMGIISPSAGSTAYAQKFQGRVTMTRDTSTSTVYMELSSLRSEDTAVYYCARGGGSSPRLDYWGQGTLVTVSS

SEQ ID NO: 329 - protein, 119 aa, synthetic construct
  source 1..119: note = 2E4A3.189[B7H3]_H1.48
QVQLVQSGAEVKKPGASVKVSCKASGYSFTDNYMHWVRQAPGQGLEWMGIISPSAGTTSYAQKFQGRVTMTRDTSTSTVYMELSSLRSEDTAVYYCARGGGSSPRLDYWGQGTLVTVSS

SEQ ID NO: 330 - protein, 119 aa, synthetic construct
  source 1..119: note = 2E4A3.189[B7H3]_H1.49
QVQLVQSGAEVKKPGASVKVSCKASGYSFTDNYMHWVRQAPGQGLEWMGIISPSVGTTSYAQKFQGRVTMTRDTSTSTVYMELSSLRSEDTAVYYCARGGGSSPRLDYWGQGTLVTVSS

SEQ ID NO: 331 - protein, 119 aa, synthetic construct
  source 1..119: note = 2E4A3.189[B7H3]_H1.50
QVQLVQSGAEVKKPGASVKVSCKASGYSFTNNYMHWVRQAPGQGLEWMGIISPSAGTTSYAQKFQGRVTMTRDTSTSTVYMELSSLRSEDTAVYYCARGGGSSPRLDYWGQGTLVTVSS

SEQ ID NO: 332 - protein, 119 aa, synthetic construct
  source 1..119: note = 2E4A3.189[B7H3]_H1.51
QVQLVQSGAEVKKPGASVKVSCKASGYTFTDNYMHWVRQAPGQGLEWMGIISPSAGTTSYAQKFQGRVTMTRDTSTSTVYMELSSLRSEDTAVYYCARGGGSSPRLDYWGQGTLVTVSS

SEQ ID NO: 333 - protein, 119 aa, synthetic construct
  source 1..119: note = 2E4A3.189[B7H3]_H1.52
QVQLVQSGAEVKKPGASVKVSCKASGYSFTDHYMHWVRQAPGQGLEWMGIISPSSGRTDYAQKFQGRVTMTRDTSTSTVYMELSSLRSEDTAVYYCARGGGSSPRLDYWGQGTLVTVSS

SEQ ID NO: 334 - protein, 119 aa, synthetic construct
  source 1..119: note = 2E4A3.189[B7H3]_H1.53
QVQLVQSGAEVKKPGASVKVSCKASGYTFTNNYMHWVRQAPGQGLEWMGIISPSGGSTAYAQKFQGRVTMTRDTSTSTVYMELSSLRSEDTAVYYCARGGGSSPRLDYWGQGTLVTVSS

SEQ ID NO: 335 - protein, 119 aa, synthetic construct
  source 1..119: note = 2E4A3.189[B7H3]_H1.54
QVQLVQSGAEVKKPGASVKVSCKASGYTFIDNYMHWVRQAPGQGLEWMGIISPSAGSTAYAQKFQGRVTMTRDTSTSTVYMELSSLRSEDTAVYYCARGGGSSPRLDYWGQGTLVTVSS

SEQ ID NO: 336 - protein, 119 aa, synthetic construct
  source 1..119: note = 2E4A3.189[B7H3]_H1.55
QVQLVQSGAEVKKPGASVKVSCKASGYIFTDNYMHWVRQAPGQGLEWMGIISPSVGTTSYAQKFQGRVTMTRDTSTSTVYMELSSLRSEDTAVYYCARGGGSSPRLDYWGQGTLVTVSS

SEQ ID NO: 337 - protein, 119 aa, synthetic construct
  source 1..119: note = 2E4A3.189[B7H3]_H1.56
QVQLVQSGAEVKKPGASVKVSCKASGYTFTNNYMHWVRQAPGQGLEWMGIISPSAGTTSYAQKFQGRVTMTRDTSTSTVYMELSSLRSEDTAVYYCARGGGSSPRLDYWGQGTLVTVSS

SEQ ID NO: 338 - protein, 119 aa, synthetic construct
  source 1..119: note = 2E4A3.189[B7H3]_H1.57
QVQLVQSGAEVKKPGASVKVSCKASGYIFTNHYMHWVRQAPGQGLEWMGIISPSAGTTSYAQKFQGRVTMTRDTSTSTVYMELSSLRSEDTAVYYCARGGGSSPRLDYWGQGTLVTVSS

SEQ ID NO: 339 - protein, 119 aa, synthetic construct
  source 1..119: note = 2E4A3.189[B7H3]_H1.58
QVQLVQSGAEVKKPGASVKVSCKASGYTFTNHYMHWVRQAPGQGLEWMGIISPSAGTTSYAQKFQGRVTMTRDTSTSTVYMELSSLRSEDTAVYYCARGGGSSPRLDYWGQGTLVTVSS

SEQ ID NO: 340 - protein, 119 aa, synthetic construct
  source 1..119: note = 2E4A3.189[B7H3]_H1.59
QVQLVQSGAEVKKPGASVKVSCKASGYPFTNNYMHWVRQAPGQGLEWMGIISPSVGTTSYAQKFQGRVTMTRDTSTSTVYMELSSLRSEDTAVYYCARGGGSSPRLDYWGQGTLVTVSS

SEQ ID NO: 341 - protein, 119 aa, synthetic construct
  source 1..119: note = 2E4A3.189[B7H3]_H1.60
QVQLVQSGAEVKKPGASVKVSCKASGYTFTDNYMHWVRQAPGQGLEWMGIISPSGGTTAYAQKFQGRVTMTRDTSTSTVYMELSSLRSEDTAVYYCARGGGSSPRLDYWGQGTLVTVSS

SEQ ID NO: 342 - protein, 119 aa, synthetic construct
  source 1..119: note = 2E4A3.189[B7H3]_H1.61
QVQLVQSGAEVKKPGASVKVSCKASGYTFINNYMHWVRQAPGQGLEWMGIISPIAGSTDYAQKFQGRVTMTRDTSTSTVYMELSSLRSEDTAVYYCARGGGSSPRLDYWGQGTLVTVSS

SEQ ID NO: 343 - protein, 119 aa, synthetic construct
  source 1..119: note = 2E4A3.189[B7H3]_H1.62
QVQLVQSGAEVKKPGASVKVSCKASGYAFTNNYMHWVRQAPGQGLEWMGIISPSVGRTAYAQKFQGRVTMTRDTSTSTVYMELSSLRSEDTAVYYCARGGGSSPRLDYWGQGTLVTVSS

SEQ ID NO: 344 - protein, 119 aa, synthetic construct
  source 1..119: note = 2E4A3.189[B7H3]_H1.63
QVQLVQSGAEVKKPGASVKVSCKASGYIFTNNYMHWVRQAPGQGLEWMGIIAPSVGRTAYAQKFQGRVTMTRDTSTSTVYMELSSLRSEDTAVYYCARGGGSSPRLDYWGQGTLVTVSS

SEQ ID NO: 345 - protein, 119 aa, synthetic construct; identical to SEQ ID NO: 301
  source 1..119: note = 2E4A3.189[B7H3]_H1.64

SEQ ID NO: 346 - protein, 119 aa, synthetic construct
  source 1..119: note = 2E4A3.189[B7H3]_H1.65
QVQLVQSGAEVKKPGASVKVSCKASGYIFTNNYMHWVRQAPGQGLEWMGIISPVVGRTAYAQKFQGRVTMTRDTSTSTVYMELSSLRSEDTAVYYCARGGGSSPRLDYWGQGTLVTVSS

SEQ ID NO: 347 - protein, 119 aa, synthetic construct
  source 1..119: note = 2E4A3.189[B7H3]_H1.66
QVQLVQSGAEVKKPGASVKVSCKASGYGFTNNYMHWVRQAPGQGLEWMGIISPLVGRTAYAQKFQGRVTMTRDTSTSTVYMELSSLRSEDTAVYYCARGGGSSPRLDYWGQGTLVTVSS

SEQ ID NO: 348 - protein, 119 aa, synthetic construct
  source 1..119: note = 2E4A3.189[B7H3]_H1.67
QVQLVQSGAEVKKPGASVKVSCKASGYIFTNNYMHWVRQAPGQGLEWMGIISPLVGRTAYAQKFQGRVTMTRDTSTSTVYMELSSLRSEDTAVYYCARGGGSSPRLDYWGQGTLVTVSS

SEQ ID NO: 349 - protein, 119 aa, synthetic construct
  source 1..119: note = 2E4A3.189[B7H3]_H1.68
QVQLVQSGAEVKKPGASVKVSCKASGYLFTNNYMHWVRQAPGQGLEWMGIISPSVGRTAYAQKFQGRVTMTRDTSTSTVYMELSSLRSEDTAVYYCARGGGSSPRLDYWGQGTLVTVSS

SEQ ID NO: 350 - protein, 119 aa, synthetic construct
  source 1..119: note = 2E4A3.189[B7H3]_H1.69
QVQLVQSGAEVKKPGASVKVSCKASGYIFTNNYMHWVRQAPGQGLEWMGIISPQVGRTAYAQKFQGRVTMTRDTSTSTVYMELSSLRSEDTAVYYCARGGGSSPRLDYWGQGTLVTVSS

SEQ ID NO: 351 - protein, 119 aa, synthetic construct
  source 1..119: note = 2E4A3.189[B7H3]_H1.70
QVQLVQSGAEVKKPGASVKVSCKASGYFFTNNYMHWVRQAPGQGLEWMGIISPLVGRTAYAQKFQGRVTMTRDTSTSTVYMELSSLRSEDTAVYYCARGGGSSPRLDYWGQGTLVTVSS

SEQ ID NO: 352 - protein, 119 aa, synthetic construct
  source 1..119: note = 2E4A3.189[B7H3]_H1.71
QVQLVQSGAEVKKPGASVKVSCKASGYIFTNNYMHWVRQAPGQGLEWMGIISPSVGRTAYAQKFQGRVTMTRDTSTSTVYMELSSLRSEDTAVYYCARGGGSSPRSDYWGQGTLVTVSS

SEQ ID NO: 353 - protein, 119 aa, synthetic construct
  source 1..119: note = 2E4A3.189[B7H3]_H1.72
QVQLVQSGAEVKKPGASVKVSCKASGYIFVINYMHWVRQAPGQGLEWMGIISPAVGRTAYAQKFQGRVTMTRDTSTSTVYMELSSLRSEDTAVYYCARGGGSSPRLDYWGQGTLVTVSS

SEQ ID NO: 354 - protein, 119 aa, synthetic construct
  source 1..119: note = 2E4A3.189[B7H3]_H1.73
QVQLVQSGAEVKKPGASVKVSCKASGYIFTNNYMHWVRQAPGQGLEWMGIISPSVGRTAYAQKFQGRVTMTRDTSTSTVYMELSSLRSEDTAVYYCARGGFSSPRVDYWGQGTLVTVSS

SEQ ID NO: 355 - protein, 119 aa, synthetic construct
  source 1..119: note = 2E4A3.189[B7H3]_H1.74
QVQLVQSGAEVKKPGASVKVSCKASGYSFKNNYMHWVRQAPGQGLEWMGIISPLVGRTAYAQKFQGRVTMTRDTSTSTVYMELSSLRSEDTAVYYCARGGGSSPRLDYWGQGTLVTVSS

SEQ ID NO: 356 - protein, 119 aa, synthetic construct
  source 1..119: note = 2E4A3.189[B7H3]_H1.75
QVQLVQSGAEVKKPGASVKVSCKASGYIFTNNYMHWVRQAPGQGLEWMGIISPSVGRTAYAQKFQGRVTMTRDTSTSTVYMELSSLRSEDTAVYYCARGGGSSPRGDYWGQGTLVTVSS

SEQ ID NO: 357 - protein, 119 aa, synthetic construct
  source 1..119: note = 2E4A3.189[B7H3]_H1.76
QVQLVQSGAEVKKPGASVKVSCKASGYIFTNNYMHWVRQAPGQGLEWMGIISPSVGRTAYAQKFQGRVTMTRDTSTSTVYMELSSLRSEDTAVYYCARGGGSSPRVDYWGQGTLVTVSS

SEQ ID NO: 358 - protein, 119 aa, synthetic construct
  source 1..119: note = 2E4A3.189[B7H3]_H1.77
QVQLVQSGAEVKKPGASVKVSCKASGYGFTNNYMHWVRQAPGQGLEWMGIISPVVGRTAYAQKFQGRVTMTRDTSTSTVYMELSSLRSEDTAVYYCARGGGSSPRLDYWGQGTLVTVSS

SEQ ID NO: 359 - protein, 119 aa, synthetic construct
  source 1..119: note = 2E4A3.189[B7H3]_H1.78
QVQLVQSGAEVKKPGASVKVSCKASGYIFTNNYMHWVRQAPGQGLEWMGIISPSVGRTAYAQKFQGRVTMTRDTSTSTVYMELSSLRSEDTAVYYCARAGWSSPRLDYWGQGTLVTVSS

SEQ ID NO: 360 - protein, 119 aa, synthetic construct
  source 1..119: note = 2E4A3.189[B7H3]_H1.79
QVQLVQSGAEVKKPGASVKVSCKASGYIFENNYMHWVRQAPGQGLEWMGIISPSVGRWAYAQKFQGRVTMTRDTSTSTVYMELSSLRSEDTAVYYCARGGGSSPRLDYWGQGTLVTVSS

SEQ ID NO: 361 - protein, 119 aa, synthetic construct
  source 1..119: note = 2E4A3.189[B7H3]_H1.80
QVQLVQSGAEVKKPGASVKVSCKASGYIFTNVYMHWVRQAPGQGLEWMGIIFPGVGRTAYAQKFQGRVTMTRDTSTSTVYMELSSLRSEDTAVYYCARGGGSSPRLDYWGQGTLVTVSS

SEQ ID NO: 362 - protein, 119 aa, synthetic construct
  source 1..119: note = 2E4A3.189[B7H3]_H1.81
QVQLVQSGAEVKKPGASVKVSCKASGYIFVFNYMHWVRQAPGQGLEWMGIISPSVGRTDYAQKFQGRVTMTRDTSTSTVYMELSSLRSEDTAVYYCARGGGSSPRLDYWGQGTLVTVSS

SEQ ID NO: 363 - protein, 119 aa, synthetic construct
  source 1..119: note = 2E4A3.189[B7H3]_H1.82
QVQLVQSGAEVKKPGASVKVSCKASGYIFTNNYMHWVRQAPGQGLEWMGIISPSVGRTAYAQKFQGRVTMTRDTSTSTVYMELSSLRSEDTAVYYCARGGLSSPRQDYWGQGTLVTVSS

SEQ ID NO: 364 - protein, 119 aa, synthetic construct
  source 1..119: note = 2E4A3.189[B7H3]_H1.83
QVQLVQSGAEVKKPGASVKVSCKASGYIFVNNYMHWVRQAPGQGLEWMGIISPSVGRILYAQKFQGRVTMTRDTSTSTVYMELSSLRSEDTAVYYCARGGGSSPRLDYWGQGTLVTVSS

SEQ ID NO: 365 - protein, 119 aa, synthetic construct
  source 1..119: note = 2E4A3.189[B7H3]_H1.84
QVQLVQSGAEVKKPGASVKVSCKASGYIFSNNYMHWVRQAPGQGLEWMGIISPSVGRTQYAQKFQGRVTMTRDTSTSTVYMELSSLRSEDTAVYYCARGGGSSPRLDYWGQGTLVTVSS

SEQ ID NO: 366 - protein, 119 aa, synthetic construct
  source 1..119: note = 2E4A3.189[B7H3]_H1.85
QVQLVQSGAEVKKPGASVKVSCKASGYIFTNNYMHWVRQAPGQGLEWMGIISPSVGRTAYAQKFQGRVTMTRDTSTSTVYMELSSLRSEDTAVYYCARGGMSSPRVDYWGQGTLVTVSS

SEQ ID NO: 367 - protein, 119 aa, synthetic construct
  source 1..119: note = 2E4A3.189[B7H3]_H1.86
QVQLVQSGAEVKKPGASVKVSCKASGLGFTNNYMHWVRQAPGQGLEWMGILSPAVGRTAYAQKFQGRVTMTRDTSTSTVYMELSSLRSEDTAVYYCARGGGSSPRLDYWGQGTLVTVSS

SEQ ID NO: 368 - protein, 119 aa, synthetic construct
  source 1..119: note = 2E4A3.189[B7H3]_H1.87
QVQLVQSGAEVKKPGASVKVSCKASGYIFTNNYMHWVRQAPGQGLEWMGIIGPAVGRTAYAQKFQGRVTMTRDTSTSTVYMELSSLRSEDTAVYYCARGGGSSPRLDYWGQGTLVTVSS

SEQ ID NO: 369 - protein, 119 aa, synthetic construct
  source 1..119: note = 2E4A3.189[B7H3]_H1.88
QVQLVQSGAEVKKPGASVKVSCKASGYIFTNNYMHWVRQAPGQGLEWMGILSPVVGRTAYAQKFQGRVTMTRDTSTSTVYMELSSLRSEDTAVYYCARGGGSSPRLDYWGQGTLVTVSS

SEQ ID NO: 370 - protein, 30 aa, synthetic construct
  source 1..30: note = 2E4A3.189 VH - HFR1
  VARIANT 27: note = Y or L
  VARIANT 28: note = I, T, P, A, S, G, L, or F
  VARIANT 30: note = T, I, V, K, E, or S
QVQLVQSGAEVKKPGASVKVSCKASGXXFX

SEQ ID NO: 371 - skipped

SEQ ID NO: 372 - protein, 14 aa, synthetic construct
  source 1..14: note = 2E4A3.189 VH - HFR2
WVRQAPGQGLEWMG

SEQ ID NO: 373 - protein, 17 aa, synthetic construct
  source 1..17: note = 2E4A3.189 VH - HCDR2
  VARIANT 2: note = I or L
  VARIANT 3: note = S, A, F, or G
  VARIANT 5: note = S, I, V, L, Q, A, or G
  VARIANT 6: note = A, S, V, G, or T
  VARIANT 8: note = T, R, or S
  VARIANT 9: note = T, W, or I
  VARIANT 10: note = S, D, A, N, I, L, or Q
IXXPXXGXXXYAQKFQG

SEQ ID NO: 374 - protein, 32 aa, synthetic construct
  source 1..32: note = 2E4A3.189 VH - HFR3
  VARIANT 2: note = V or F
RXTMTRDTSTSTVYMELSSLRSEDTAVYYCAR

SEQ ID NO: 375 - protein, 10 aa, synthetic construct
  source 1..10: note = 2E4A3.189 VH - HCDR3
  VARIANT 1: note = G or A
  VARIANT 3: note = G, F, W, L, or M
  VARIANT 8: note = L, S, V, G, or Q
XGXSSPRXDY

SEQ ID NO: 376 - protein, 11 aa, synthetic construct
  source 1..11: note = 2E4A3.189 VH - HFR4
WGQGTLVTVSS

SEQ ID NO: 377 - protein, 23 aa, synthetic construct
  source 1..23: note = 2E4A3.189 VL - LFR1
DIQMTQSPSSLSASVGDRVTITC

SEQ ID NO: 378 - protein, 11 aa, synthetic construct
  source 1..11: note = 2E4A3.189 VL - LCDR1
RASQSISSYLN

SEQ ID NO: 379 - protein, 15 aa, synthetic construct
  source 1..15: note = 2E4A3.189 VL - LFR2
WYQQKPGKAPKLLIY

SEQ ID NO: 380 - protein, 7 aa, synthetic construct
  source 1..7: note = 2E4A3.189 VL - LCDR2
AASSLQS

SEQ ID NO: 381 - protein, 32 aa, synthetic construct
  source 1..32: note = 2E4A3.189 VL - LFR3
GVPSRFSGSGSGTDFTLTISSLQPEDFATYYC

SEQ ID NO: 382 - protein, 9 aa, synthetic construct
  source 1..9: note = 2E4A3.189 VL - LCDR3
QQSYSTPYT

SEQ ID NO: 383 - protein, 10 aa, synthetic construct
  source 1..10: note = 2E4A3.189 VL - LFR4
FGQGTKLEIK

SEQ ID NO: 384 - protein, 120 aa, synthetic construct
  source 1..120: note = omburtamab - Variable heavy (vh) domain
VHQVQLQQSGAELVKPGASVKLSCKASGYTFTNYDINWVRQRPEQGLEWIGWIFPGDGSTQYNEKFKGKATLTTDTSSSTAYMQLSRLTSEDSAVYFCARQTTATWFAYWGQGTLVTVSA

SEQ ID NO: 385 - protein, 5 aa, synthetic construct
  source 1..5: note = omburtamab - vhCDR1
NYDIN

SEQ ID NO: 386 - protein, 17 aa, synthetic construct
  source 1..17: note = omburtamab - vhCDR2
WIFPGDGSTQYNEKFKG

SEQ ID NO: 387 - protein, 9 aa, synthetic construct
  source 1..9: note = omburtamab - vhCDR3
QTTATWFAY

SEQ ID NO: 388 - protein, 109 aa, synthetic construct
  source 1..109: note = omburtamab - Variable light (vl) domain
VLDIVMTQSPATLSVTPGDRVSLSCRASQSISDYLHWYQQKSHESPRLLIKYASQSISGIPSRFSGSGSGSDFTLSINSVEPEDVGVYYCQNGHSFPLTFGAGTKLELK

SEQ ID NO: 389 - protein, 11 aa, synthetic construct
  source 1..11: note = omburtamab - vlCDR1
RASQSISDYLH

SEQ ID NO: 390 - protein, 7 aa, synthetic construct
  source 1..7: note = omburtamab - vlCDR2
YASQSIS

SEQ ID NO: 391 - protein, 9 aa, synthetic construct
  source 1..9: note = omburtamab - vlCDR3
QNGHSFPLT

SEQ ID NO: 392 - protein, 120 aa, synthetic construct
  source 1..120: note = 8H9 - Variable heavy (vh) domain
VHQVKLQQSGAELVKPGASVKLSCKASGYTFTNYDINWVRQRPEQGLEWIGWIFPGDGSTQYNEKFKGKATLTTDTSSSTAYMQLSRLTSEDSAVYFCARQTTATWFAYWGQGTTVTVSS

SEQ ID NO: 393 - protein, 5 aa, synthetic construct
  source 1..5: note = 8H9 - vhCDR1
NYDIN

SEQ ID NO: 394 - protein, 17 aa, synthetic construct
  source 1..17: note = 8H9 - vhCDR2
WIFPGDGSTQYNEKFKG

SEQ ID NO: 395 - protein, 9 aa, synthetic construct
  source 1..9: note = 8H9 - vhCDR3
QTTATWFAY

SEQ ID NO: 396 - protein, 109 aa, synthetic construct
  source 1..109: note = 8H9 - Variable light (vl) domain
VLDIELTQSPTTLSVTPGDRVSLSCRASQSISDYLHWYQQKSHESPRLLIKYASQSISGIPSRFSGSGSGSDFTLSINSVEPEDVGVYYCQNGHSFPLTFGAGTKLELK

SEQ ID NO: 397 - protein, 11 aa, synthetic construct
  source 1..11: note = 8H9 - vlCDR1
RASQSISDYLH

SEQ ID NO: 398 - protein, 7 aa, synthetic construct
  source 1..7: note = 8H9 - vlCDR2
YASQSIS

SEQ ID NO: 399 - protein, 9 aa, synthetic construct
  source 1..9: note = 8H9 - vlCDR3
QNGHSFPLT

SEQ ID NO: 400 - protein, 124 aa, synthetic construct
  source 1..124: note = enoblituzumab - Variable heavy (vh) domain
VHEVQLVESGGGLVQPGGSLRLSCAASGFTFSSFGMHWVRQAPGKGLEWVAYISSDSSAIYYADTVKGRFTISRDNAKNSLYLQMNSLRDEDTAVYYCGRGRENIYYGSRLDYWGQGTTVTVSS

SEQ ID NO: 401 - protein, 5 aa, synthetic construct
  source 1..5: note = enoblituzumab - vhCDR1
SFGMH

SEQ ID NO: 402 - protein, 17 aa, synthetic construct
  source 1..17: note = enoblituzumab - vhCDR2
YISSDSSAIYYADTVKG

SEQ ID NO: 403 - protein, 13 aa, synthetic construct
  source 1..13: note = enoblituzumab - vhCDR3
GRENIYYGSRLDY

SEQ ID NO: 404 - protein, 109 aa, synthetic construct
  source 1..109: note = enoblituzumab - Variable light (vl) domain
VLDIQLTQSPSFLSASVGDRVTITCKASQNVDTNVAWYQQKPGKAPKALIYSASYRYSGVPSRFSGSGSGTDFTLTISSLQPEDFATYYCQQYNNYPFTFGQGTKLEIK

SEQ ID NO: 405 - protein, 11 aa, synthetic construct
  source 1..11: note = enoblituzumab - vlCDR1
KASQNVDTNVA

SEQ ID NO: 406 - protein, 7 aa, synthetic construct
  source 1..7: note = enoblituzumab - vlCDR2
SASYRYS

SEQ ID NO: 407 - protein, 9 aa, synthetic construct
  source 1..9: note = enoblituzumab - vlCDR3
QQYNNYPFT

SEQ ID NO: 408 - protein, 124 aa, synthetic construct
  source 1..124: note = BRCA84D - Variable heavy (vh) domain
VHDVQLVESGGGLVQPGGSRKLSCAASGFTFSSFGMHWVRQAPEKGLEWVAYISSDSSAIYYADTVKGRFTISRDNPKNTLFLQMTSLRSEDTAMYYCGRGRENIYYGSRLDYWGQGTTLTVSS

SEQ ID NO: 409 - protein, 5 aa, synthetic construct
  source 1..5: note = BRCA84D - vhCDR1
SFGMH

SEQ ID NO: 410 - protein, 17 aa, synthetic construct
  source 1..17: note = BRCA84D - vhCDR2
YISSDSSAIYYADTVKG

SEQ ID NO: 411 - protein, 13 aa, synthetic construct
  source 1..13: note = BRCA84D - vhCDR3
GRENIYYGSRLDY

SEQ ID NO: 412 - protein, 109 aa, synthetic construct
  source 1..109: note = BRCA84D - Variable light (vl) domain
VLDIAMTQSQKFMSTSVGDRVSVTCKASQNVDTNVAWYQQKPGQSPKALIYSASYRYSGVPDRFTGSGSGTDFTLTINNVQSEDLAEYFCQQYNNYPFTFGSGTKLEIK

SEQ ID NO: 413 - protein, 11 aa, synthetic construct
  source 1..11: note = BRCA84D - vlCDR1
KASQNVDTNVA

SEQ ID NO: 414 - protein, 7 aa, synthetic construct
  source 1..7: note = BRCA84D - vlCDR2
SASYRYS

SEQ ID NO: 415 - protein, 9 aa, synthetic construct
  source 1..9: note = BRCA84D - vlCDR3
QQYNNYPFT

SEQ ID NO: 416 - protein, 122 aa, synthetic construct
  source 1..122: note = BRCA69D - Variable heavy (vh) domain
VHQVQLQQSGAELARPGASVKLSCKASGYTFTSYWMQWVKQRPGQGLEWIGTIYPGDGDTRYTQKFKGKATLTADKSSSTAYMQLSSLASEDSAVYYCARRGIPRLWYFDVWGAGTTVTVSS

SEQ ID NO: 417 - protein, 5 aa, synthetic construct
  source 1..5: note = BRCA69D - vhCDR1
SYWMQ

SEQ ID NO: 418 - protein, 17 aa, synthetic construct
  source 1..17: note = BRCA69D - vhCDR2
TIYPGDGDTRYTQKFKG

SEQ ID NO: 419 - protein, 11 aa, synthetic construct
  source 1..11: note = BRCA69D - vhCDR3
RGIPRLWYFDV

SEQ ID NO: 420 - protein, 109 aa, synthetic construct
  source 1..109: note = BRCA69D - Variable light (vl) domain
VLDIQMTQTTSSLSASLGDRVTISCRASQDISNYLNWYQQKPDGTVKLLIYYTSRLHSGVPSRFSGSGSGTDYSLTIDNLEQEDIATYFCQQGNTLPPTFGGGTKLEIK

SEQ ID NO: 421 - protein, 11 aa, synthetic construct
  source 1..11: note = BRCA69D - vlCDR1
RASQDISNYLN

SEQ ID NO: 422 - protein, 7 aa, synthetic construct
  source 1..7: note = BRCA69D - vlCDR2
YTSRLHS

SEQ ID NO: 423 - protein, 9 aa, synthetic construct
  source 1..9: note = BRCA69D - vlCDR3
QQGNTLPPT

SEQ ID NO: 424 - protein, 119 aa, synthetic construct
  source 1..119: note = PRCA157 - Variable heavy (vh) domain
VHEVQQVESGGDLVKPGGSLKLSCAASGFTFSSYGMSWVRQTPDKRLEWVATINSGGSNTYYPDSLKGRFTISRDNAKNTLYLQMRSLKSEDTAMYYCARHDGGAMDYWGQGTSVTVSS

SEQ ID NO: 425 - protein, 5 aa, synthetic construct
  source 1..5: note = PRCA157 - vhCDR1
SYGMS

SEQ ID NO: 426 - protein, 17 aa, synthetic construct
  source 1..17: note = PRCA157 - vhCDR2
TINSGGSNTYYPDSLKG

SEQ ID NO: 427 - protein, 8 aa, synthetic construct
  source 1..8: note = PRCA157 - vhCDR3
HDGGAMDY

SEQ ID NO: 428 - protein, 110 aa, synthetic construct
  source 1..110: note = PRCA157 - Variable light (vl) domain
VLDIQMTQSPASLSVSVGETVTITCRASESIYSYLAWYQQKQGKSPQLLVYNTKTLPEGVPSRFSGSGSGTQFSLKINSLQPEDFGRYYCQHHYGTPPWTFGGGTNLEIK

SEQ ID NO: 429 - protein, 11 aa, synthetic construct
  source 1..11: note = PRCA157 - vlCDR1
RASESIYSYLA

SEQ ID NO: 430 - protein, 7 aa, synthetic construct
  source 1..7: note = PRCA157 - vlCDR2
NTKTLPE

SEQ ID NO: 431 - protein, 10 aa, synthetic construct
  source 1..10: note = PRCA157 - vlCDR3
QHHYGTPPWT

SEQ ID NO: 432 - protein, 119 aa, synthetic construct
  source 1..119: note = huPRCA157 - Variable heavy (vh) domain
VHEVQLVESGGGLVKPGGSLRLSCAASGFTFSSYGMSWVRQAPGKGLEWVATINSGGSNTYYPDSLKGRFTISRDNAKNSLYLQMNSLRAEDTAVYYCARHDGGAMDYWGQGTTVTVSS

SEQ ID NO: 433 - protein, 5 aa, synthetic construct
  source 1..5: note = huPRCA157 - vhCDR1
SYGMS

SEQ ID NO: 434 - protein, 17 aa, synthetic construct
  source 1..17: note = huPRCA157 - vhCDR2
TINSGGSNTYYPDSLKG

SEQ ID NO: 435 - protein, 8 aa, synthetic construct
  source 1..8: note = huPRCA157 - vhCDR3
HDGGAMDY

SEQ ID NO: 436 - protein, 110 aa, synthetic construct
  source 1..110: note = huPRCA157 - Variable light (vl) domain
VLDIQMTQSPSSLSASVGDRVTITCRASESIYSYLAWYQQKPGKAPKLLVYNTKTLPEGVPSRFSGSGSGTDFTLTISSLQPEDFATYYCQHHYGTPPWTFGQGTRLEIK

SEQ ID NO: 437 - protein, 11 aa, synthetic construct
  source 1..11: note = huPRCA157 - vlCDR1
RASESIYSYLA

SEQ ID NO: 438 - protein, 7 aa, synthetic construct
  source 1..7: note = huPRCA157 - vlCDR2
NTKTLPE

SEQ ID NO: 439 - protein, 10 aa, synthetic construct
  source 1..10: note = huPRCA157 - vlCDR3
QHHYGTPPWT

SEQ ID NO: 440 - protein, 121 aa, synthetic construct
  source 1..121: note = mAb-D - Variable heavy (vh) domain
VHDVQLAESGGGLVQPGGSRKLSCAASGFTFSSFGMHWVRQAPEKGLEWVAYISSGSGTIYYADTVKGRFTISRDNPKNSLFLQMTSLRSEDTAMYYCARHGYRYEGFDYWGQGTTLTVSS

SEQ ID NO: 441 - protein, 5 aa, synthetic construct
  source 1..5: note = mAb-D - vhCDR1
SFGMH

SEQ ID NO: 442 - protein, 17 aa, synthetic construct
  source 1..17: note = mAb-D - vhCDR2
YISSGSGTIYYADTVKG

SEQ ID NO: 443 - protein, 10 aa, synthetic construct
  source 1..10: note = mAb-D - vhCDR3
HGYRYEGFDY

SEQ ID NO: 444 - protein, 109 aa, synthetic construct
  source 1..109: note = mAb-D - Variable light (vl) domain
VLDIVMTQSQKFMSTSVGDRVSVTCKASQNVDTNVAWYQQKQGHSPEALIYSASYRYSGVPARFTGSGSGTDFTLTISNVQSEDLAEYFCQQYNNYPFTFGGGTKLEIK

SEQ ID NO: 445 - protein, 11 aa, synthetic construct
  source 1..11: note = mAb-D - vlCDR1
KASQNVDTNVA

SEQ ID NO: 446 - protein, 7 aa, synthetic construct
  source 1..7: note = mAb-D - vlCDR2
SASYRYS

SEQ ID NO: 447 - protein, 9 aa, synthetic construct
  source 1..9: note = mAb-D - vlCDR3
QQYNNYPFT

SEQ ID NO: 448 - protein, 121 aa, synthetic construct
  source 1..121: note = humAb-D - Variable heavy (vh) domain
VHEVQLVESGGGLVQPGGSLRLSCAASGFTFSSFGMHWVRQAPGKGLEWVAYISSGSGTIYYADTVKGRFTISRDNAKNSLYLQMNSLRAEDTAVYYCARHGYRYEGFDYWGQGTTVTVSS

SEQ ID NO: 449 - protein, 5 aa, synthetic construct
  source 1..5: note = humAb-D - vhCDR1
SFGMH

SEQ ID NO: 450 - protein, 17 aa, synthetic construct
  source 1..17: note = humAb-D - vhCDR2
YISSGSGTIYYADTVKG

SEQ ID NO: 451 - protein, 10 aa, synthetic construct
  source 1..10: note = humAb-D - vhCDR3
HGYRYEGFDY

SEQ ID NO: 452 - protein, 109 aa, synthetic construct
  source 1..109: note = humAb-D - Variable light (vl) domain
VLDIQMTQSPSFLSASVGDRVTITCKASQNVDTNVAWYQQKPGKAPKALIYSASYRYSGVPSRFSGSGSGTDFTLTISSLQPEDFAEYFCQQYNNYPFTFGQGTKLEIK

SEQ ID NO: 453 - protein, 11 aa, synthetic construct
  source 1..11: note = humAb-D - vlCDR1
KASQNVDTNVA

SEQ ID NO: 454 - protein, 7 aa, synthetic construct
  source 1..7: note = humAb-D - vlCDR2
SASYRYS

SEQ ID NO: 455 - protein, 9 aa, synthetic construct
  source 1..9: note = humAb-D - vlCDR3
QQYNNYPFT

SEQ ID NO: 456 - protein, 124 aa, synthetic construct
  source 1..124: note = M30 - Variable heavy (vh) domain
VHEVQLQQSGPELVKPGASVKMSCKASGYTFTNYVMHWVKQKPGQGLEWIGYINPYNDDVKYNEKFKGKATQTSDKSSSTAYMELSSLTSEDSAVYYCARWGYYGSPLYYFDYWGQGTTLTVSS

SEQ ID NO: 457 - protein, 5 aa, synthetic construct
  source 1..5: note = M30 - vhCDR1
NYVMH

SEQ ID NO: 458 - protein, 17 aa, synthetic construct
  source 1..17: note = M30 - vhCDR2
YINPYNDDVKYNEKFKG

SEQ ID NO: 459 - protein, 13 aa, synthetic construct
  source 1..13: note = M30 - vhCDR3
WGYYGSPLYYFDY

SEQ ID NO: 460 - protein, 108 aa, synthetic construct
  source 1..108: note = M30 - Variable light (vl) domain
VLQIVLSQSPTILSASPGEKVTMTCRASSRLIYMHWYQQKPGSSPKPWIYATSNLASGVPARFSGSGSGTSYSLTISRVEAEDAATYYCQQWNSNPPTFGTGTKLELK

SEQ ID NO: 461 - protein, 10 aa, synthetic construct
  source 1..10: note = M30 - vlCDR1
RASSRLIYMH

SEQ ID NO: 462 - protein, 7 aa, synthetic construct
  source 1..7: note = M30 - vlCDR2
ATSNLAS

SEQ ID NO: 463 - protein, 9 aa, synthetic construct
  source 1..9: note = M30 - vlCDR3
QQWNSNPPT

SEQ ID NO: 464 - protein, 124 aa, synthetic construct
  source 1..124: note = M30-H1-L4 - Variable heavy (vh) domain
VHQVQLVQSGAEVKKPGSSVKVSCKASGYTFTNYVMHWVRQAPGQGLEWMGYINPYNDDVKYNEKFKGRVTITADESTSTAYMELSSLRSEDTAVYYCARWGYYGSPLYYFDYWGQGTLVTVSS

SEQ ID NO: 465 - protein, 5 aa, synthetic construct
  source 1..5: note = M30-H1-L4 - vhCDR1
NYVMH

SEQ ID NO: 466 - protein, 17 aa, synthetic construct
  source 1..17: note = M30-H1-L4 - vhCDR2
YINPYNDDVKYNEKFKG

SEQ ID NO: 467 - protein, 13 aa, synthetic construct
  source 1..13: note = M30-H1-L4 - vhCDR3
WGYYGSPLYYFDY

SEQ ID NO: 468 - protein, 108 aa, synthetic construct
  source 1..108: note = M30-H1-L4 - Variable light (vl) domain
VLQIVLSQSPATLSLSPGERATLTCRASSRLIYMHWYQQKPGSAPKLWIYATSNLASGIPARFSGSGSGTSYTLTISRLEPEDFAVYYCQQWNSNPPTFGQGTKVEIK

SEQ ID NO: 469 - protein, 10 aa, synthetic construct
  source 1..10: note = M30-H1-L4 - vlCDR1
RASSRLIYMH

SEQ ID NO: 470 - protein, 7 aa, synthetic construct
  source 1..7: note = M30-H1-L4 - vlCDR2
ATSNLAS

SEQ ID NO: 471 - protein, 9 aa, synthetic construct
  source 1..9: note = M30-H1-L4 - vlCDR3
QQWNSNPPT

SEQ ID NO: 472 - protein, 122 aa, synthetic construct
  source 1..122: note = SP265 - Variable heavy (vh) domain
VHQSVEESRGGLIKPTDTLTLTCTVSGFSLGSYGVSWVRQAPGNGLEWIGGSGKRGNPYYASWAKSRSTITRNTNLNTVTLKMTSLTAADTATYFCASRAPVVSTSMTFNIWGPGTLVTVSS

SEQ ID NO: 473 - protein, 5 aa, synthetic construct
  source 1..5: note = SP265 - vhCDR1
SYGVS

SEQ ID NO: 474 - protein, 16 aa, synthetic construct
  source 1..16: note = SP265 - vhCDR2
GSGKRGNPYYASWAKS

SEQ ID NO: 475 - protein, 13 aa, synthetic construct
  source 1..13: note = SP265 - vhCDR3
RAPVVSTSMTFNI

SEQ ID NO: 476 - protein, 115 aa, synthetic construct
  source 1..115: note = SP265 - Variable light (vl) domain
VLAQVPTQTPSPVSAAVGGTVTINCQASQSVYNNKNLSWYQQKPGQPPKLLIYEASTLASGVPSRFSGSGSGTQFALTISGVQCEDAATYYCQGEFTCSGADCGAFGGGTEVVVK

SEQ ID NO: 477 - protein, 13 aa, synthetic construct
  source 1..13: note = SP265 - vlCDR1
QASQSVYNNKNLS

SEQ ID NO: 478 - protein, 7 aa, synthetic construct
  source 1..7: note = SP265 - vlCDR2
EASTLAS

SEQ ID NO: 479 - protein, 13 aa, synthetic construct
  source 1..13: note = SP265 - vlCDR3
QGEFTCSGADCGA

SEQ ID NO: 480 - protein, 124 aa, synthetic construct
  source 1..124: note = S10-H50L58 - Variable heavy (vh) domain
VHQEQLEESGGDLVKPGASLTLTCTASGFSFSSSYWICWVRQAPGKGLEWIACIYAGSSLNTYYAPWAKGRFTISKTSSATVTLQMTSLTAADTATYSCARTVVGGWGYALDLWGPGTLVTVSS

SEQ ID NO: 481 - protein, 6 aa, synthetic construct
  source 1..6: note = S10-H50L58 - vhCDR1
SSYWIC

SEQ ID NO: 482 - protein, 18 aa, synthetic construct
  source 1..18: note = S10-H50L58 - vhCDR2
CIYAGSSLNTYYAPWAKG

SEQ ID NO: 483 - protein, 12 aa, synthetic construct
  source 1..12: note = S10-H50L58 - vhCDR3
TVVGGWGYALDL

SEQ ID NO: 484 - protein, 114 aa, synthetic construct
  source 1..114: note = S10-H50L58 - Variable light (vl) domain
VLQVLTQTPSPVSAAVGGTVTINCQASQSVYNNKNLSWYQQKPGQPPKLLIYEASTLASGVPSRFSGSGSGTQFALTISGVQCEDAATYYCQGEFTCSGADCGAFGGGTEVVVK

SEQ ID NO: 485 - protein, 13 aa, synthetic construct
  source 1..13: note = S10-H50L58 - vlCDR1
QASQSVYNNKNLS

SEQ ID NO: 486 - protein, 7 aa, synthetic construct
  source 1..7: note = S10-H50L58 - vlCDR2
EASTLAS

SEQ ID NO: 487 - protein, 13 aa, synthetic construct
  source 1..13: note = S10-H50L58 - vlCDR3
QGEFTCSGADCGA

SEQ ID NO: 488 - protein, 122 aa, synthetic construct
  source 1..122: note = m852 - Variable heavy (vh) domain
VHQVQLQQSGAEVKKPGSSVKVSCKASGGTFSSYAISWVRQAPGQGLEWMGGIIPILGIANYAQKFQGRVTITADESTSTAYMELSSLRSEDTAVYYCARGRRSGSYYMGYWGQGTLVTVSS

SEQ ID NO: 489 - protein, 5 aa, synthetic construct
  source 1..5: note = m852 - vhCDR1
SYAIS

SEQ ID NO: 490 - protein, 17 aa, synthetic construct
  source 1..17: note = m852 - vhCDR2
GIIPILGIANYAQKFQG

SEQ ID NO: 491 - protein, 11 aa, synthetic construct
  source 1..11: note = m852 - vhCDR3
GRRSGSYYMGY

SEQ ID NO: 492 - protein, 111 aa, synthetic construct
  source 1..111: note = m852 - Variable light (vl) domain
VLEIVLTQSPATLSLSPGERATLSCRASQSVSSNLAWYQQKPGQAPRLLIYDTSTRATGIPARFSGSGSGTEFTLTISSLQSEDFAVYYCQQYNNWPPAYTFGQGTKLEIK

SEQ ID NO: 493 - protein, 11 aa, synthetic construct
  source 1..11: note = m852 - vlCDR1
RASQSVSSNLA

SEQ ID NO: 494 - protein, 7 aa, synthetic construct
  source 1..7: note = m852 - vlCDR2
DTSTRAT

SEQ ID NO: 495 - protein, 11 aa, synthetic construct
  source 1..11: note = m852 - vlCDR3
QQYNNWPPAYT

SEQ ID NO: 496 - protein, 5 aa, synthetic construct
  source 1..5: note = m857 - vhCDR1
SYAIS

SEQ ID NO: 497 - protein, 17 aa, synthetic construct
  source 1..17: note = m857 - vhCDR2
GIIPILGIANYAQKFQG

SEQ ID NO: 498 - protein, 10 aa, synthetic construct
  source 1..10: note = m857 - vhCDR3
GGSGSYAFDI

SEQ ID NO: 499 - protein, 111 aa, synthetic construct
  source 1..111: note = m857 - Variable light (vl) domain
VLEIVLTQSPATLSLSPGERATLSCRASQSVSSYLAWYQQKPGQAPRLLIYDASNRATGIPARFSGSGSGTDFTLTISSLEPEDFAVYYCQQRSNWPPSYTFGQGTKLEIK

SEQ ID NO: 500 - protein, 11 aa, synthetic construct
  source 1..11: note = m857 - vlCDR1
RASQSVSSYLA

SEQ ID NO: 501 - protein, 7 aa, synthetic construct
  source 1..7: note = m857 - vlCDR2
DASNRAT

SEQ ID NO: 502 - protein, 11 aa, synthetic construct
  source 1..11: note = m857 - vlCDR3
QQRSNWPPSYT

SEQ ID NO: 503 - protein, 121 aa, synthetic construct
  source 1..121: note = m8524 - Variable heavy (vh) domain
VHQVQLQQSGAEVKKPGSSVKVSCKASGGTFSSYAISWVRQAPGQGLEWMGGIIPILGIANYAQKFQGRVTITADESTSTAYMELSSLRSEDTAVYYCARGGSGSYHMDVWGKGTTVTVSS

SEQ ID NO: 504 - protein, 5 aa, synthetic construct
  source 1..5: note = m8524 - vhCDR1
SYAIS

SEQ ID NO: 505 - protein, 17 aa, synthetic construct
  source 1..17: note = m8524 - vhCDR2
GIIPILGIANYAQKFQG

SEQ ID NO: 506 - protein, 10 aa, synthetic construct
  source 1..10: note = m8524 - vhCDR3
GGSGSYHMDV

SEQ ID NO: 507 - protein, 111 aa, synthetic construct
  source 1..111: note = m8524 - Variable light (vl) domain
VLEIVLTQSPATLSLSPGERATLSCRASQSVSSYLAWYQQKPGQAPRLLIYDASNRATGIPARFSGSGSGTDFTLTISSLEPEDFAVYYCQQRSNWPPRITFGQGTRLEIK

SEQ ID NO: 508 - protein, 11 aa, synthetic construct
  source 1..11: note = m8524 - vlCDR1
RASQSVSSYLA

SEQ ID NO: 509 - protein, 7 aa, synthetic construct
  source 1..7: note = m8524 - vlCDR2
DASNRAT

SEQ ID NO: 510 - protein, 11 aa, synthetic construct
  source 1..11: note = m8524 - vlCDR3
QQRSNWPPRIT

SEQ ID NO: 511 - protein, 120 aa, synthetic construct
  source 1..120: note = 1-1 - Variable heavy (vh) domain
VHQVQLQQSGAEVKKPGASVKVSCKASGYTFTNYDINWVRQAPGQGLEWIGWIFPGDGSTQYNGKFKGRATLTTDTSTSTAYMELSSLRSEDTAVYFCARQTTGTWFAYWGQGTLVTVSS

SEQ ID NO: 512 - protein, 5 aa, synthetic construct
  source 1..5: note = 1-1 - vhCDR1
NYDIN

SEQ ID NO: 513 - protein, 17 aa, synthetic construct
  source 1..17: note = 1-1 - vhCDR2
WIFPGDGSTQYNGKFKG

SEQ ID NO: 514 - protein, 9 aa, synthetic construct
  source 1..9: note = 1-1 - vhCDR3
QTTGTWFAY

SEQ ID NO: 515 - protein, 109 aa, synthetic construct
  source 1..109: note = 1-1 - Variable light (vl) domain
VLDIVLTQSPATLSLSPGERATLSCRASQSISPYLHWYQQKPGQAPRLLIKYASQSWSGIPARFSGSGSGSDFTLTISSLEPEDFAVYYCQNGHSFPLTFGGGTKVEIK

SEQ ID NO: 516 - protein, 11 aa, synthetic construct
  source 1..11: note = 1-1 - vlCDR1
RASQSISPYLH

SEQ ID NO: 517 - protein, 7 aa, synthetic construct
  source 1..7: note = 1-1 - vlCDR2
YASQSWS

SEQ ID NO: 518 - protein, 9 aa, synthetic construct
  source 1..9: note = 1-1 - vlCDR3
QNGHSFPLT

SEQ ID NO: 519 - protein, 120 aa, synthetic construct
  source 1..120: note = 1-2 - Variable heavy (vh) domain
VHQVQLQQSGAEVKKPGASVKVSCKASGYTFTNYDINWVRQAPGQGLEWIGWIFPGDGSTQYNETFKGRATLTTDTSTSTAYMELSSLRSEDTAVYFCARQTTGTWFAYWGQGTLVTVSS

SEQ ID NO: 520 - protein, 5 aa, synthetic construct
  source 1..5: note = 1-2 - vhCDR1
NYDIN

SEQ ID NO: 521 - protein, 17 aa, synthetic construct
  source 1..17: note = 1-2 - vhCDR2
WIFPGDGSTQYNETFKG

SEQ ID NO: 522 - skipped

SEQ ID NO: 523 - protein, 9 aa, synthetic construct
  source 1..9: note = 1-2 - vhCDR3
QTTGTWFAY

SEQ ID NO: 524 - protein, 109 aa, synthetic construct
  source 1..109: note = 1-2 - Variable light (vl) domain
VLDIVLTQSPATLSLSPGERATLSCRASQSISKYLHWYQQKPGQAPRLLIKYANQSIRGIPARFSGSGSGSDFTLTISSLEPEDFAVYYCQNGHSFPLTFGGGTKVEIK

SEQ ID NO: 525 - protein, 11 aa, synthetic construct
  source 1..11: note = 1-2 - vlCDR1
RASQSISKYLH

SEQ ID NO: 526 - protein, 7 aa, synthetic construct
  source 1..7: note = 1-2 - vlCDR2
YANQSIR

SEQ ID NO: 527 - protein, 9 aa, synthetic construct
  source 1..9: note = 1-2 - vlCDR3
QNGHSFPLT

SEQ ID NO: 528 - protein, 120 aa, synthetic construct
  source 1..120: note = 1-4 - Variable heavy (vh) domain
VHQVQLQQSGAEVKKPGASVKVSCKASGYTFTNYDINWVRQAPGQGLEWIGWIFPGDGSTQYNPKFKGRATLTTDTSTSTAYMELSSLRSEDTAVYFCARQTTGTWFAYWGQGTLVTVSS

SEQ ID NO: 529 - protein, 5 aa, synthetic construct
  source 1..5: note = 1-4 - vhCDR1
NYDIN

SEQ ID NO: 530 - protein, 17 aa, synthetic construct
  source 1..17: note = 1-4 - vhCDR2
WIFPGDGSTQYNPKFKG

SEQ ID NO: 531 - protein, 9 aa, synthetic construct
  source 1..9: note = 1-4 - vhCDR3
QTTGTWFAY

SEQ ID NO: 532 - protein, 109 aa, synthetic construct
  source 1..109: note = 1-4 - Variable light (vl) domain
VLDIVLTQSPATLSLSPGERATLSCRASQSISTYLHWYQQKPGQAPRLLIKEASQSISGIPARFSGSGSGSDFTLTISSLEPEDFAVYYCQNGHSFPLTFGGGTKVEIK

SEQ ID NO: 533 - protein, 11 aa, synthetic construct
  source 1..11: note = 1-4 - vlCDR1
RASQSISTYLH

SEQ ID NO: 534 - protein, 7 aa, synthetic construct
  source 1..7: note = 1-4 - vlCDR2
EASQSIS

SEQ ID NO: 535 - protein, 9 aa, synthetic construct
  source 1..9: note = 1-4 - vlCDR3
QNGHSFPLT

SEQ ID NO: 536 - protein, 120 aa, synthetic construct
  source 1..120: note = 1-5 - Variable heavy (vh) domain
VHQVQLQQSGAEVKKPGASVKVSCKASGYTFTNYDINWVRQAPGQGLEWIGWIFPGDGSTQYNEKFKGRATLTTDTSTSTAYMELSSLRSEDTAVYFCARQTTGTWFAYWGQGTLVTVSS

SEQ ID NO: 537 - protein, 5 aa, synthetic construct
  source 1..5: note = 1-5 - vhCDR1
NYDIN

SEQ ID NO: 538 - protein, 17 aa, synthetic construct
  source 1..17: note = 1-5 - vhCDR2
WIFPGDGSTQYNEKFKG

SEQ ID NO: 539 - protein, 9 aa, synthetic construct
  source 1..9: note = 1-5 - vhCDR3
QTTGTWFAY

SEQ ID NO: 540 - protein, 109 aa, synthetic construct
  source 1..109: note = 1-5 - Variable light (vl) domain
VLDIVLTQSPATLSLSPGERATLSCRASQSISHYLHWYQQKPGQAPRLLIKYASQSLSGIPARFSGSGSGSDFTLTISSLEPEDFAVYYCQNGHSFPLTFGGGTKVEIK

SEQ ID NO: 541 - protein, 11 aa, synthetic construct
  source 1..11: note = 1-5 - vlCDR1
RASQSISHYLH

SEQ ID NO: 542 - protein, 7 aa, synthetic construct
  source 1..7: note = 1-5 - vlCDR2
YASQSLS

SEQ ID NO: 543 - protein, 9 aa, synthetic construct
  source 1..9: note = 1-5 - vlCDR3
QNGHSFPLT

SEQ ID NO: 544 - protein, 120 aa, synthetic construct
  source 1..120: note = 1-7 - Variable heavy (vh) domain
VHQVQLQQSGAEVKKPGASVKVSCKASGYTYTNYDINWVRQAPGQGLEWIGWIFPGDGSTQYNEKFKGRATLTTDTSTSTAYMELSSLRSEDTAVYFCARQTTGTWFAYWGQGTLVTVSS

SEQ ID NO: 545 - protein, 5 aa, synthetic construct
  source 1..5: note = 1-7 - vhCDR1
NYDIN

SEQ ID NO: 546 - protein, 17 aa, synthetic construct
  source 1..17: note = 1-7 - vhCDR2
WIFPGDGSTQYNEKFKG

SEQ ID NO: 547 - protein, 9 aa, synthetic construct
  source 1..9: note = 1-7 - vhCDR3
QTTGTWFAY

SEQ ID NO: 548 - protein, 109 aa, synthetic construct
  source 1..109: note = 1-7 - Variable light (vl) domain
VLDIVLTQSPATLSLSPGERATLSCRASQSISPYLHWYQQKPGQAPRLLIKHASQSISGIPARFSGSGSGSDFTLTISSLEPEDFAVYYCQNGHSFPLTFGGGTKVEIK

SEQ ID NO: 549 - protein, 11 aa, synthetic construct
  source 1..11: note = 1-7 - vlCDR1
RASQSISPYLH

SEQ ID NO: 550 - protein, 7 aa, synthetic construct
  source 1..7: note = 1-7 - vlCDR2
HASQSIS

SEQ ID NO: 551 - protein, 9 aa, synthetic construct
  source 1..9: note = 1-7 - vlCDR3
QNGHSFPLT

SEQ ID NO: 552 - protein, 120 aa, synthetic construct
  source 1..120: note = 2-5 - Variable heavy (vh) domain
VHQVQLQQSGAEVKKPGASVKVSCKASGYTFTNYDINWVRQAPGQGLEWIGWIFPGDGSTQYNEKFKGRATLTTDTSTSTAYMELSSLRSEDTAVYFCARQTTSTWFAYWGQGTLVTVSS

SEQ ID NO: 553 - protein, 5 aa, synthetic construct
  source 1..5: note = 2-5 - vhCDR1
NYDIN

SEQ ID NO: 554 - protein, 17 aa, synthetic construct
  source 1..17: note = 2-5 - vhCDR2
WIFPGDGSTQYNEKFKG

SEQ ID NO: 555 - protein, 9 aa, synthetic construct
  source 1..9: note = 2-5 - vhCDR3
QTTSTWFAY

SEQ ID NO: 556 - protein, 109 aa, synthetic construct
  source 1..109: note = 2-5 - Variable light (vl) domain
VLDIVLTQSPATLSLSPGERATLSCRASQIISDYLHWYQQKPGQAPRLLIKYASQLISGIPARFSGSGSGSDFTLTISSLEPEDFAVYYCQNGHSFPLTFGGGTKVEIK

SEQ ID NO: 557 - protein, 11 aa, synthetic construct
  source 1..11: note = 2-5 - vlCDR1
RASQIISDYLH

SEQ ID NO: 558 - protein, 7 aa, synthetic construct
  source 1..7: note = 2-5 - vlCDR2
YASQLIS

SEQ ID NO: 559 - protein, 9 aa, synthetic construct
  source 1..9: note = 2-5 - vlCDR3
QNGHSFPLT

SEQ ID NO: 560 - protein, 120 aa, synthetic construct; identical to SEQ ID NO: 536
  source 1..120: note = 2-8 - Variable heavy (vh) domain

SEQ ID NO: 561 - protein, 5 aa, synthetic construct
  source 1..5: note = 2-8 - vhCDR1
NYDIN

SEQ ID NO: 562 - protein, 17 aa, synthetic construct
  source 1..17: note = 2-8 - vhCDR2
WIFPGDGSTQYNEKFKG

SEQ ID NO: 563 - protein, 9 aa, synthetic construct
  source 1..9: note = 2-8 - vhCDR3
QTTGTWFAY

SEQ ID NO: 564 - protein, 109 aa, synthetic construct
  source 1..109: note = 2-8 - Variable light (vl) domain
VLDIVLTQSPATLSLSPGERATLSCRASQSISEYLHWYQQKPGQAPRLLIKHASQSISGIPARFSGSGSGSDFTLTISSLEPEDFAVYYCQNGHSFPLTFGGGTKVEIK

SEQ ID NO: 565 - protein, 11 aa, synthetic construct
  source 1..11: note = 2-8 - vlCDR1
RASQSISEYLH

SEQ ID NO: 566 - protein, 7 aa, synthetic construct
  source 1..7: note = 2-8 - vlCDR2
HASQSIS

SEQ ID NO: 567 - protein, 9 aa, synthetic construct
  source 1..9: note = 2-8 - vlCDR3
QNGHSFPLT

SEQ ID NO: 568 - protein, 122 aa, synthetic construct
  source 1..122: note = chAb2 - Variable heavy (vh) domain
VHQVQLQQPGAELVKPGASVKLSCKASGYTFTSYWMHWVKQRPGQGLEWIGMIHPDSGTTNYNEKFRSKATLTVDKSSSTAYMQLSSLTSEDSAVYYCAVYYGSTYWYFDVWGTGTTVTVSS

SEQ ID NO: 569 - protein, 5 aa, synthetic construct
  source 1..5: note = chAb2 - vhCDR1
SYWMH

SEQ ID NO: 570 - protein, 17 aa, synthetic construct
  source 1..17: note = chAb2 - vhCDR2
MIHPDSGTTNYNEKFRS

SEQ ID NO: 571 - protein, 11 aa, synthetic construct
  source 1..11: note = chAb2 - vhCDR3
YYGSTYWYFDV

SEQ ID NO: 572 - protein, 114 aa, synthetic construct
  source 1..114: note = chAb2 - Variable light (vl) domain
VLDVVMTQTPLSLPVSLGDQAYISCRSSQSLVHINGNTYLHWYRQKPGQSPKLLIYKVSNRFSGVPDRFSGSGSGTDFTLKISRVEAEDLGVYFCSQSTHFPFTFGSGTKLEIK

SEQ ID NO: 573 - protein, 16 aa, synthetic construct
  source 1..16: note = chAb2 - vlCDR1
RSSQSLVHINGNTYLH

SEQ ID NO: 574 - protein, 7 aa, synthetic construct
  source 1..7: note = chAb2 - vlCDR2
KVSNRFS

SEQ ID NO: 575 - protein, 9 aa, synthetic construct
  source 1..9: note = chAb2 - vlCDR3
SQSTHFPFT

SEQ ID NO: 576 - protein, 119 aa, synthetic construct
  source 1..119: note = chAb3 - Variable heavy (vh) domain
VHQVQLQQPGAELVKPGASVKLSCKASGYTFSSYWMHWVKQRPGQGLEWIGLIHPDSGSTNYNEMFKNKATLTVDRSSSTAYVQLSSLTSEDSAVYFCAGGGRLYFDYWGQGTTLTVSS

SEQ ID NO: 577 - protein, 5 aa, synthetic construct
  source 1..5: note = chAb3 - vhCDR1
SYWMH

SEQ ID NO: 578 - protein, 17 aa, synthetic construct
  source 1..17: note = chAb3 - vhCDR2
LIHPDSGSTNYNEMFKN

SEQ ID NO: 579 - protein, 8 aa, synthetic construct
  source 1..8: note = chAb3 - vhCDR3
GGRLYFDY

SEQ ID NO: 580 - protein, 114 aa, synthetic construct
  source 1..114: note = chAb3 - Variable light (vl) domain
VLDVVMTQTPLSLPVSLGDQASISCRSSQSLVHSNGDTYLRWYLQKPGQSPKLLIYKVSNRFSGVPDRFSGSGSGTDFTLKITRVEAEDLGVYFCSQSTHVPYTFGGGTKLEIK

SEQ ID NO: 581 - protein, 16 aa, synthetic construct
  source 1..16: note = chAb3 - vlCDR1
RSSQSLVHSNGDTYLR

SEQ ID NO: 582 - protein, 7 aa, synthetic construct
  source 1..7: note = chAb3 - vlCDR2
KVSNRFS

SEQ ID NO: 583 - protein, 9 aa, synthetic construct
  source 1..9: note = chAb3 - vlCDR3
SQSTHVPYT

SEQ ID NO: 584 - protein, 119 aa, synthetic construct
  source 1..119: note = chAb4 - Variable heavy (vh) domain
VHQVQLQQPGAELVKPGASVKLSCKASGYSFTSYWMHWVKQRPGQGLEWIGMIHPNSGSNNYNEKFKSKATLTVDKSSNTAYMQLSSLTSEDSAVYYCARRLGLHFDYWGQGTTLTVSS

SEQ ID NO: 585 - protein, 5 aa, synthetic construct
  source 1..5: note = chAb4 - vhCDR1
SYWMH

SEQ ID NO: 586 - protein, 17 aa, synthetic construct
  source 1..17: note = chAb4 - vhCDR2
MIHPNSGSNNYNEKFKS

SEQ ID NO: 587 - protein, 8 aa, synthetic construct
  source 1..8: note = chAb4 - vhCDR3
RLGLHFDY

SEQ ID NO: 588 - protein, 107 aa, synthetic construct
  source 1..107: note = chAb4 - Variable light (vl) domain
DIVMTQSQKFMSTPVGDRVSITCKASQNVGTAVAWYQQKPGQSPKLLIYSASNRYTGVPDRFTGSGSGTDFTLTISNMQSEDLADYFCQQYSSYPYTFGGGTKLEIK

SEQ ID NO: 589 - protein, 11 aa, synthetic construct
  source 1..11: note = chAb4 - vlCDR1
KASQNVGTAVA

SEQ ID NO: 590 - protein, 7 aa, synthetic construct
  source 1..7: note = chAb4 - vlCDR2
SASNRYT

SEQ ID NO: 591 - protein, 9 aa, synthetic construct
  source 1..9: note = chAb4 - vlCDR3
QQYSSYPYT

SEQ ID NO: 592 - protein, 121 aa, synthetic construct
  source 1..121: note = chAb18 - Variable heavy (vh) domain
QVQLQQSAAELARPGASVKMSCKASGYSFTSYTIHWVKQRPGQGLEWIGYINPNSRNTDYNQKFKDETTLTADRSSSTAYMQLISLTSEDSAVYYCARYSGSTPYWYFDVWGAGTTVTVSS

SEQ ID NO: 593 - protein, 5 aa, synthetic construct
  source 1..5: note = chAb18 - vhCDR1
SYTIH

SEQ ID NO: 594 - protein, 17 aa, synthetic construct
  source 1..17: note = chAb18 - vhCDR2
YINPNSRNTDYNQKFKD

SEQ ID NO: 595 - protein, 12 aa, synthetic construct
  source 1..12: note = chAb18 - vhCDR3
YSGSTPYWYFDV

SEQ ID NO: 596 - protein, 106 aa, synthetic construct
  source 1..106: note = chAb18 - Variable light (vl) domain
QIVLTQSPAILSASPGEKVTMTCRASSSVSYMNWYQQKPGSSPKPWIYATSNLASGVPARFSVSVSGTSHSLTISRVEAEDAATYYCQQWSSNPLTFGAGTKLELK

SEQ ID NO: 597 - protein, 10 aa, synthetic construct
  source 1..10: note = chAb18 - vlCDR1
RASSSVSYMN

SEQ ID NO: 598 - protein, 7 aa, synthetic construct
  source 1..7: note = chAb18 - vlCDR2
ATSNLAS

SEQ ID NO: 599 - protein, 9 aa, synthetic construct
  source 1..9: note = chAb18 - vlCDR3
QQWSSNPLT

SEQ ID NO: 600 - protein, 116 aa, synthetic construct
  source 1..116: note = chAb13 - Variable heavy (vh) domain
DVQLQESGPDLVKPSQSLSLTCTVTGYSITSGYSWHWIRQFPGNKLEWMGYIHSSGSTNYNPSLKSRISINRDTSKNQFFLQLNSVTTEDTATYYCAGYDDYFEYWGQGTTLTVSS

SEQ ID NO: 601 - protein, 6 aa, synthetic construct
  source 1..6: note = chAb13 - vhCDR1
SGYSWH

SEQ ID NO: 602 - protein, 16 aa, synthetic construct
  source 1..16: note = chAb13 - vhCDR2
YIHSSGSTNYNPSLKS

SEQ ID NO: 603 - protein, 7 aa, synthetic construct
  source 1..7: note = chAb13 - vhCDR3
YDDYFEY

SEQ ID NO: 604 - protein, 107 aa, synthetic construct
  source 1..107: note = chAb13 - Variable light (vl) domain
DIVMTQSQKFMSTSVGDRVSVTCKASQNVGFNVAWYQQKPGQSPKALIYSASYRYSGVPDRFTGSGSGTDFTLTISNVQSEDLAEYFCQQYNSYPFTFGSGTKLEIK

SEQ ID NO: 605 - protein, 11 aa, synthetic construct
  source 1..11: note = chAb13 - vlCDR1
KASQNVGFNVA

SEQ ID NO: 606 - protein, 7 aa, synthetic construct
  source 1..7: note = chAb13 - vlCDR2
SASYRYS

SEQ ID NO: 607 - protein, 9 aa, synthetic construct
  source 1..9: note = chAb13 - vlCDR3
QQYNSYPFT

SEQ ID NO: 608 - protein, 118 aa, synthetic construct
  source 1..118: note = chAb12 - Variable heavy (vh) domain
EVQLVESGGGLVKPGGSLKLSCAASGFTFSSYAMSWVRQTPEKRLEWVATISSGTNYTYYPDSVKGRFTISRDNAKNTLYLQMTSLRSEDTAMYYCARQGRYSWIAYWGQGTLVTVSA

SEQ ID NO: 609 - protein, 5 aa, synthetic construct
  source 1..5: note = chAb12 - vhCDR1
SYAMS

SEQ ID NO: 610 - protein, 17 aa, synthetic construct
  source 1..17: note = chAb12 - vhCDR2
TISSGTNYTYYPDSVKG

SEQ ID NO: 611 - protein, 9 aa, synthetic construct
  source 1..9: note = chAb12 - vhCDR3
QGRYSWIAY

SEQ ID NO: 612 - protein, 110 aa, synthetic construct
  source 1..110: note = chAb12 - Variable light (vl) domain
DIVLTQSPASLAVSLGQRATISCRASKSVSTSDYSYMHWNQQKPGQPPKLLIYLASNLESGVPARFSGSGSGTDFTLNIHPVEEEDAATYYCQHSRELLTFGAGTKLELK

SEQ ID NO: 613 - protein, 15 aa, synthetic construct
  source 1..15: note = chAb12 - vlCDR1
RASKSVSTSDYSYMH

SEQ ID NO: 614 - protein, 7 aa, synthetic construct
  source 1..7: note = chAb12 - vlCDR2
LASNLES

SEQ ID NO: 615 - protein, 8 aa, synthetic construct
  source 1..8: note = chAb12 - vlCDR3
QHSRELLT

SEQ ID NO: 616 - protein, 118 aa, synthetic construct
  source 1..118: note = chAb14 - Variable heavy (vh) domain
EVKLVESGGGLVKPGGSLKLSCAASGFTFSSYGMSWVRQTPEKRLEWVATISGGGTNTYYPDSVEGRFTISRDNAKNFLYLQMSSLRSEDTALYYCARHYGSQTMDYWGQGTSVTVSS

SEQ ID NO: 617 - protein, 5 aa, synthetic construct
  source 1..5: note = chAb14 - vhCDR1
SYGMS

SEQ ID NO: 618 - protein, 17 aa, synthetic construct
  source 1..17: note = chAb14 - vhCDR2
TISGGGTNTYYPDSVEG

SEQ ID NO: 619 - protein, 9 aa, synthetic construct
  source 1..9: note = chAb14 - vhCDR3
HYGSQTMDY

SEQ ID NO: 620 - protein, 107 aa, synthetic construct
  source 1..107: note = chAb14 - Variable light (vl) domain
DIQMTQSPASLSASVGETVTITCRTSGNIHNYLTWYQQKQGKSPQLLVYNAKTLADGVPSRFSGSGSGTQFSLKINSLQPEDFGSYYCQHFWSIMWTFGGGTKLEIK

SEQ ID NO: 621 - protein, 11 aa, synthetic construct
  source 1..11: note = chAb14 - vlCDR1
RTSGNIHNYLT

SEQ ID NO: 622 - protein, 7 aa, synthetic construct
  source 1..7: note = chAb14 - vlCDR2
NAKTLAD

SEQ ID NO: 623 - protein, 9 aa, synthetic construct
  source 1..9: note = chAb14 - vlCDR3
QHFWSIMWT

SEQ ID NO: 624 - protein, 121 aa, synthetic construct
  source 1..121: note = chAb6 - Variable heavy (vh) domain
QVQLQQSGAELMKPGASVKISCKATGYTFSRYWIEWVKQRPGHGLEWIGEILPGSGSTNYNEKFKGKATFTADTSSNTAYMQVSSLTSEDSAVHYCARRGYGYVPYALDYWGQGTSVTVSS

SEQ ID NO: 625 - protein, 5 aa, synthetic construct
  source 1..5: note = chAb6 - vhCDR1
RYWIE

SEQ ID NO: 626 - protein, 17 aa, synthetic construct
  source 1..17: note = chAb6 - vhCDR2
EILPGSGSTNYNEKFKG

SEQ ID NO: 627 - protein, 12 aa, synthetic construct
  source 1..12: note = chAb6 - vhCDR3
RGYGYVPYALDY

SEQ ID NO: 628 - protein, 107 aa, synthetic construct
  source 1..107: note = chAb6 - Variable light (vl) domain
EIQMTQTTSSLSASLGDRVTISCRASQDISNSLNWYQQKPDGTVNLLIYYTSRLYSGVPSRFSGSGSGTDYSLTISNLEQEDIATYFCQQGNTLPYTFGGGTKLEIK

SEQ ID NO: 629 - protein, 11 aa, synthetic construct
  source 1..11: note = chAb6 - vlCDR1
RASQDISNSLN

SEQ ID NO: 630 - protein, 7 aa, synthetic construct
  source 1..7: note = chAb6 - vlCDR2
YTSRLYS

SEQ ID NO: 631 - protein, 9 aa, synthetic construct
  source 1..9: note = chAb6 - vlCDR3
QQGNTLPYT

SEQ ID NO: 632 - protein, 120 aa, synthetic construct
  source 1..120: note = chAb11 - Variable heavy (vh) domain
EVKLVESGGGLVQPGGSLRLSCATSGFTFTNYYMSWVRQPPGKALEWLGFIRNKANDYTTEYSASVKGRFTISRDNSQSILYLQMNTLRAEDSATYYCARESPGNPFAYWGQGTLVTVSA

SEQ ID NO: 633 - protein, 5 aa, synthetic construct
  source 1..5: note = chAb11 - vhCDR1
NYYMS

SEQ ID NO: 634 - protein, 19 aa, synthetic construct
  source 1..19: note = chAb11 - vhCDR2
FIRNKANDYTTEYSASVKG

SEQ ID NO: 635 - protein, 9 aa, synthetic construct
  source 1..9: note = chAb11 - vhCDR3
ESPGNPFAY

SEQ ID NO: 636 - protein, 113 aa, synthetic construct
  source 1..113: note = chAb11 - Variable light (vl) domain
DIVMTQSPSSLTVTAGEKVTMTCKSSQSLLNSGTQKNFLTWYQQKPGQPPKLLIYWASTRESGVPDRFTGSGSGTDFTLTISSVQAEDLAVYFCQNDYIYPLTFGAGTKLELK

SEQ ID NO: 637 - protein, 17 aa, synthetic construct
  source 1..17: note = chAb11 - vlCDR1
KSSQSLLNSGTQKNFLT

SEQ ID NO: 638 - protein, 7 aa, synthetic construct
  source 1..7: note = chAb11 - vlCDR2
WASTRES

SEQ ID NO: 639 - protein, 9 aa, synthetic construct
  source 1..9: note = chAb11 - vlCDR3
QNDYIYPLT

SEQ ID NO: 640 - protein, 121 aa, synthetic construct
  source 1..121: note = chAb16 - Variable heavy (vh) domain
EVKLLESGGGLVQPGGSLKLSCAASGFDFSRYWMSWVRQAPGKGLEWIGEINPDSSTINYTPSLKDKFIISRDNAKNTLYLQMSKVRSEDTALYYCARPGFGNYIYAMDYWGQGTSVTVSS

SEQ ID NO: 641 - protein, 5 aa, synthetic construct
  source 1..5: note = chAb16 - vhCDR1
RYWMS

SEQ ID NO: 642 - protein, 17 aa, synthetic construct
  source 1..17: note = chAb16 - vhCDR2
EINPDSSTINYTPSLKD

SEQ ID NO: 643 - protein, 12 aa, synthetic construct
  source 1..12: note = chAb16 - vhCDR3
PGFGNYIYAMDY

SEQ ID NO: 644 - protein, 107 aa, synthetic construct
  source 1..107: note = chAb16 - Variable light (vl) domain
DIQMTQTTSSLSASLGDRVTINCRASQDISNFLNWYQQKPDGTVKLLIYYTSRLYLGVPSRFSGSGSGTDYSLTISNLEQEDIATYFCQQGNTLPPTFGGGTKLEIK

SEQ ID NO: 645 - protein, 11 aa, synthetic construct
  source 1..11: note = chAb16 - vlCDR1
RASQDISNFLN

SEQ ID NO: 646 - protein, 7 aa, synthetic construct
  source 1..7: note = chAb16 - vlCDR2
YTSRLYL

SEQ ID NO: 647 - protein, 9 aa, synthetic construct
  source 1..9: note = chAb16 - vlCDR3
QQGNTLPPT

SEQ ID NO: 648 - protein, 125 aa, synthetic construct
  source 1..125: note = chAb10 - Variable heavy (vh) domain
DVQLQESGPGLVKPSQSLSLTCTVTGYSITSDYAWNWIRQFPGNRLEWMGHINYSGITNYNPSLKSRISITRDTSKNQFFLQLYSVTTEDTATYFCARRSLFYYYGSSLYAMDYWGQGTSVTVSS

SEQ ID NO: 649 - protein, 6 aa, synthetic construct
  source 1..6: note = chAb10 - vhCDR1
SDYAWN

SEQ ID NO: 650 - protein, 16 aa, synthetic construct
  source 1..16: note = chAb10 - vhCDR2
HINYSGITNYNPSLKS

SEQ ID NO: 651 - protein, 16 aa, synthetic construct
  source 1..16: note = chAb10 - vhCDR3
RSLFYYYGSSLYAMDY

SEQ ID NO: 652 - protein, 112 aa, synthetic construct
  source 1..112: note = chAb10 - Variable light (vl) domain
DVVMTQSPFSLPVSLGDQASISCRSSQSLVHSNGNTYLHWYLQKPGQSPKLLIYKVSNRFSGVPDRFSGSGSGTDFTLKISRVEAEDLGVYFCSQSTHVPWTFGGGTKLEIK

SEQ ID NO: 653 - protein, 16 aa, synthetic construct
  source 1..16: note = chAb10 - vlCDR1
RSSQSLVHSNGNTYLH

SEQ ID NO: 654 - protein, 7 aa, synthetic construct
  source 1..7: note = chAb10 - vlCDR2
KVSNRFS

SEQ ID NO: 655 - protein, 9 aa, synthetic construct
  source 1..9: note = chAb10 - vlCDR3
SQSTHVPWT

SEQ ID NO: 656 - protein, 119 aa, synthetic construct
  source 1..119: note = chAb7 - Variable heavy (vh) domain
EVQLVESGENLVKPGGSLKLSCAASGFSFRGYGMSWVRQTPDKRLEWVAAISTGGNYTYYPDSVQGRFTISRDNANNTLYLQMSSLKSEDTAMYYCARRGGNYAGFAYWGQGTLVTVSA

SEQ ID NO: 657 - protein, 5 aa, synthetic construct
  source 1..5: note = chAb7 - vhCDR1
GYGMS

SEQ ID NO: 658 - protein, 17 aa, synthetic construct
  source 1..17: note = chAb7 - vhCDR2
AISTGGNYTYYPDSVQG

SEQ ID NO: 659 - protein, 10 aa, synthetic construct
  source 1..10: note = chAb7 - vhCDR3
RGGNYAGFAY

SEQ ID NO: 660 - protein, 107 aa, synthetic construct
  source 1..107: note = chAb7 - Variable light (vl) domain
DIQMTQSPASLSVSVGETVTITCRPSENIYSNLAWYQQKQGKSPQLLVYAATNLADGVPSRFSGSGSGTQYSLKINSLQSEDFGTYYCQHFWGTPFTFGSGTKLEIK

SEQ ID NO: 661 - protein, 11 aa, synthetic construct
  source 1..11: note = chAb7 - vlCDR1
RPSENIYSNLA

SEQ ID NO: 662 - protein, 7 aa, synthetic construct
  source 1..7: note = chAb7 - vlCDR2
AATNLAD

SEQ ID NO: 663 - protein, 9 aa, synthetic construct
  source 1..9: note = chAb7 - vlCDR3
QHFWGTPFT

SEQ ID NO: 664 - protein, 121 aa, synthetic construct
  source 1..121: note = chAb8 - Variable heavy (vh) domain
EVKLVESGGGLVKPGGSLKLSCAASGFTFSSYGMSWVRQTPEKRLEWVATISGGGNYTYCPDSVKGRFTISRDNAKNNLYLQMSSLRSEDTALYYCTRQRGYDYHYAMDFWGQGTSVTVSS

SEQ ID NO: 665 - protein, 5 aa, synthetic construct
  source 1..5: note = chAb8 - vhCDR1
SYGMS

SEQ ID NO: 666 - protein, 17 aa, synthetic construct
  source 1..17: note = chAb8 - vhCDR2
TISGGGNYTYCPDSVKG

SEQ ID NO: 667 - protein, 12 aa, synthetic construct
  source 1..12: note = chAb8 - vhCDR3
QRGYDYHYAMDF

SEQ ID NO: 668 - protein, 107 aa, synthetic construct
  source 1..107: note = chAb8 - Variable light (vl) domain
DIQMTQSPASLSVSVGETVTITCRASENIYSNLAWHQQKQGKSPQLLVYAATNLADGVPSRFSGNGSDTQYSLKINSLQSEDFGSYFCQNFWGTSWTFGGGTKLEIK

SEQ ID NO: 669 - protein, 11 aa, synthetic construct
  source 1..11: note = chAb8 - vlCDR1
RASENIYSNLA

SEQ ID NO: 670 - protein, 7 aa, synthetic construct
  source 1..7: note = chAb8 - vlCDR2
AATNLAD

SEQ ID NO: 671 - protein, 9 aa, synthetic construct
  source 1..9: note = chAb8 - vlCDR3
QNFWGTSWT

SEQ ID NO: 672 - protein, 117 aa, synthetic construct
  source 1..117: note = chAb17 - Variable heavy (vh) domain
EVKLVESGGGLVQPGGSLKLSCAASGFTFSSYIMSWVRQTPEKRLEWVASIVSSNITYYPDSMKGRFTISRDNARNILYLQMSSLKSEDTAMYYCARSGTRAWFAYWGQGTLVTVSA

SEQ ID NO: 673 - protein, 5 aa, synthetic construct
  source 1..5: note = chAb17 - vhCDR1
SYIMS

SEQ ID NO: 674 - protein, 16 aa, synthetic construct
  source 1..16: note = chAb17 - vhCDR2
SIVSSNITYYPDSMKG

SEQ ID NO: 675 - protein, 9 aa, synthetic construct
  source 1..9: note = chAb17 - vhCDR3
SGTRAWFAY

SEQ ID NO: 676 - protein, 111 aa, synthetic construct
  source 1..111: note = chAb17 - Variable light (vl) domain
DIVLTQSPASLAVSLGQRATISCRASKSVSTSAYSYMHWYQQKPGQPPKLLIYLASNLESGVPARFSGSGSGTDFTLNIHPVEEEDAATYYCQHSRELPYTFGGGTKLEIK

SEQ ID NO: 677 - protein, 15 aa, synthetic construct
  source 1..15: note = chAb17 - vlCDR1
RASKSVSTSAYSYMH

SEQ ID NO: 678 - protein, 7 aa, synthetic construct
  source 1..7: note = chAb17 - vlCDR2
LASNLES

SEQ ID NO: 679 - protein, 9 aa, synthetic construct
  source 1..9: note = chAb17 - vlCDR3
QHSRELPYT

SEQ ID NO: 680 - protein, 118 aa, synthetic construct
  source 1..118: note = chAb5 - Variable heavy (vh) domain
QVQLQQPGDELVKPGASVKLSCKTSGYTFTTDWMHWVKQRPGQGLEWIGMIHPNSGTTNYNEKFKSKAALTVDKSSSTACMQLSSLTSEDSAVYYCARSYWKWYFDVWGTGTTVTVSS

SEQ ID NO: 681 - protein, 5 aa, synthetic construct
  source 1..5: note = chAb5 - vhCDR1
TDWMH

SEQ ID NO: 682 - protein, 17 aa, synthetic construct
  source 1..17: note = chAb5 - vhCDR2
MIHPNSGTTNYNEKFKS

SEQ ID NO: 683 - protein, 9 aa, synthetic construct
  source 1..9: note = chAb5 - vhCDR3
SYWKWYFDV

SEQ ID NO: 684 - protein, 106 aa, synthetic construct
  source 1..106: note = chAb5 - Variable light (vl) domain
QIVLTQSPAIMSASLGEEITLTCSASSSVSYMHWYQQKSGTSPKLLIYSTSNLASGVPSRFSGSGSGTFYSLTISSVEAEDSADYYCHQWTSYMYTFGGGTKLEIK

SEQ ID NO: 685 - protein, 10 aa, synthetic construct
  source 1..10: note = chAb5 - vlCDR1
SASSSVSYMH

SEQ ID NO: 686 - protein, 7 aa, synthetic construct
  source 1..7: note = chAb5 - vlCDR2
STSNLAS

SEQ ID NO: 687 - protein, 9 aa, synthetic construct
  source 1..9: note = chAb5 - vlCDR3
HQWTSYMYT

SEQ ID NO: 688 - protein, 117 aa, synthetic construct
  source 1..117: note = huAb3v2.5 - Variable heavy (vh) domain
EVQLVQSGAEVKKPGSSVKVSCKASGYTFSSYWMHWVRQAPGQGLEWIGLIHPESGSTNYNEMFKNRATLTVDRSTSTAYMELSSLRSEDTAVYYCAGGGRLYFDYWGQGTTVTVSS

SEQ ID NO: 689 - protein, 5 aa, synthetic construct
  source 1..5: note = huAb3v2.5 - vhCDR1
SYWMH

SEQ ID NO: 690 - protein, 17 aa, synthetic construct
  source 1..17: note = huAb3v2.5 - vhCDR2
LIHPESGSTNYNEMFKN

SEQ ID NO: 691 - protein, 8 aa, synthetic construct
  source 1..8: note = huAb3v2.5 - vhCDR3
GGRLYFDY

SEQ ID NO: 692 - protein, 112 aa, synthetic construct
  source 1..112: note = huAb3v2.5 - Variable light (vl) domain
DIVMTQSPLSLPVTPGEPASISCRSSQSLVHSNRDTYLRWYLQKPGQSPQLLIYKVSNRFSGVPDRFSGSGSGTDFTLKISRVEAEDVGVYYCSQSTHVPYTFGGGTKVEIK

SEQ ID NO: 693 - protein, 16 aa, synthetic construct
  source 1..16: note = huAb3v2.5 - vlCDR1
RSSQSLVHSNRDTYLR

SEQ ID NO: 694 - protein, 7 aa, synthetic construct
  source 1..7: note = huAb3v2.5 - vlCDR2
KVSNRFS

SEQ ID NO: 695 - protein, 9 aa, synthetic construct
  source 1..9: note = huAb3v2.5 - vlCDR3
SQSTHVPYT

SEQ ID NO: 696 - protein, 117 aa, synthetic construct; identical to SEQ ID NO: 688
  source 1..117: note = huAb3v2.6 - Variable heavy (vh) domain

SEQ ID NO: 697 - protein, 5 aa, synthetic construct
  source 1..5: note = huAb3v2.6 - vhCDR1
SYWMH

SEQ ID NO: 698 - protein, 17 aa, synthetic construct
  source 1..17: note = huAb3v2.6 - vhCDR2
LIHPESGSTNYNEMFKN

SEQ ID NO: 699 - protein, 8 aa, synthetic construct
  source 1..8: note = huAb3v2.6 - vhCDR3
GGRLYFDY

SEQ ID NO: 700 - protein, 112 aa, synthetic construct
  source 1..112: note = huAb3v2.6 - Variable light (vl) domain
DIVMTQSPLSLPVTPGEPASISCRSSQSLVHSNQDTYLRWYLQKPGQSPQLLIYKVSNRFSGVPDRFSGSGSGTDFTLKISRVEAEDVGVYYCSQSTHVPYTFGGGTKVEIK

SEQ ID NO: 701 - protein, 16 aa, synthetic construct
  source 1..16: note = huAb3v2.6 - vlCDR1
RSSQSLVHSNQDTYLR

SEQ ID NO: 702 - protein, 7 aa, synthetic construct
  source 1..7: note = huAb3v2.6 - vlCDR2
KVSNRFS

SEQ ID NO: 703 - protein, 9 aa, synthetic construct
  source 1..9: note = huAb3v2.6 - vlCDR3
SQSTHVPYT

SEQ ID NO: 704 - protein, 116 aa, synthetic construct
  source 1..116: note = huAb13v1 - Variable heavy (vh) domain
EVQLQESGPGLVKPSETLSLTCAVTGYSITSGYSWHWIRQFPGNGLEWMGYIHSSGSTNYNPSLKSRISISRDTSKNQFFLKLSSVTAADTAVYYCAGYDDYFEYWGQGTTVTVSS

SEQ ID NO: 705 - protein, 6 aa, synthetic construct
  source 1..6: note = huAb13v1 - vhCDR1
SGYSWH

SEQ ID NO: 706 - protein, 16 aa, synthetic construct
  source 1..16: note = huAb13v1 - vhCDR2
YIHSSGSTNYNPSLKS

SEQ ID NO: 707 - protein, 7 aa, synthetic construct
  source 1..7: note = huAb13v1 - vhCDR3
YDDYFEY

SEQ ID NO: 708 - protein, 107 aa, synthetic construct
  source 1..107: note = huAb13v1 - Variable light (vl) domain
DIQMTQSPSSLSASVGDRVTITCKASQNVGFNVAWYQQKPGKSPKALIYSASYRYSGVPSRFSGSGSGTDFTLTISSLQPEDFAEYFCQQYNWYPFTFGQGTKLEIK

SEQ ID NO: 709 - protein, 11 aa, synthetic construct
  source 1..11: note = huAb13v1 - vlCDR1
KASQNVGFNVA

SEQ ID NO: 710 - protein, 7 aa, synthetic construct
  source 1..7: note = huAb13v1 - vlCDR2
SASYRYS

SEQ ID NO: 711 - protein, 9 aa, synthetic construct
  source 1..9: note = huAb13v1 - vlCDR3
QQYNWYPFT

SEQ ID NO: 712 - protein, 119 aa, synthetic construct
  source 1..119: note = TPP-5706 - Variable heavy (vh) domain
QVQLQQPGAELVKPGASVKMSCKASGYTFTIYNVHWIKQTPGQGLEWMGTIFPGNGDTSYNQKFKDKATLTTDKSSKTAYMQLNSLTSEDSAVYYCARWDDGNVGFAHWGQGTLVTVSA

SEQ ID NO: 713 - protein, 5 aa, synthetic construct
  source 1..5: note = TPP-5706 - vhCDR1
IYNVH

SEQ ID NO: 714 - protein, 17 aa, synthetic construct
  source 1..17: note = TPP-5706 - vhCDR2
TIFPGNGDTSYNQKFKD

SEQ ID NO: 715 - protein, 10 aa, synthetic construct
  source 1..10: note = TPP-5706 - vhCDR3
WDDGNVGFAH

SEQ ID NO: 716 - protein, 107 aa, synthetic construct
  source 1..107: note = TPP-5706 - Variable light (vl) domain
DIQMTQSPASLSASVGETVTITCRASENINNYLTWFQQKQGKSPQLLVYHAKTLAEGVPSRFSGSGSGTQFSLKINSLQPEDFGSYYCQHHYGTPPTFGGGTKLEIK

SEQ ID NO: 717 - protein, 11 aa, synthetic construct
  source 1..11: note = TPP-5706 - vlCDR1
RASENINNYLT

SEQ ID NO: 718 - protein, 7 aa, synthetic construct
  source 1..7: note = TPP-5706 - vlCDR2
HAKTLAE

SEQ ID NO: 719 - protein, 9 aa, synthetic construct
  source 1..9: note = TPP-5706 - vlCDR3
QHHYGTPPT

SEQ ID NO: 720 - protein, 119 aa, synthetic construct
  source 1..119: note = TPP-6642 - Variable heavy (vh) domain
EVQLVQSGAEVKKPGASVKVSCKASGYTFTIYNVHWVRQAPGQGLEWMGTIFPGNGDTSYNQKFKDKVTMTTDTSTSTAYMELSSLRSEDTAVYYCARWDDGNVGFAHWGQGTLVTVSS

SEQ ID NO: 721 - protein, 5 aa, synthetic construct
  source 1..5: note = TPP-6642 - vhCDR1
IYNVH

SEQ ID NO: 722 - protein, 17 aa, synthetic construct
  source 1..17: note = TPP-6642 - vhCDR2
TIFPGNGDTSYNQKFKD

SEQ ID NO: 723 - protein, 10 aa, synthetic construct
  source 1..10: note = TPP-6642 - vhCDR3
WDDGNVGFAH

SEQ ID NO: 724 - protein, 107 aa, synthetic construct
  source 1..107: note = TPP-6642 - Variable light (vl) domain
DIQMTQSPSSLSASVGDRVTITCRASENINNYLTWFQQKQGKSPQLLIYHAKTLAEGVPSRFSGSGSGTDFTLTISSLQPEDFATYYCQHHYGTPPTFGGGTKVEIK

SEQ ID NO: 725 - protein, 11 aa, synthetic construct
  source 1..11: note = TPP-6642 - vlCDR1
RASENINNYLT

SEQ ID NO: 726 - protein, 7 aa, synthetic construct
  source 1..7: note = TPP-6642 - vlCDR2
HAKTLAE

SEQ ID NO: 727 - protein, 9 aa, synthetic construct
  source 1..9: note = TPP-6642 - vlCDR3
QHHYGTPPT

SEQ ID NO: 728 - protein, 119 aa, synthetic construct
  source 1..119: note = TPP-6850 - Variable heavy (vh) domain
EVQLVQSGAEVKKPGASVKVSCKASGYTFTIYNVHWIRQAPGQGLEWMGTIFPGNGDTSYNQKFKDRATLTTDKSTKTAYMELRSLRSDDTAVYYCARWDDGNVGFAHWGQGTLVTVSS

SEQ ID NO: 729 - protein, 5 aa, synthetic construct
  source 1..5: note = TPP-6850 - vhCDR1
IYNVH

SEQ ID NO: 730 - protein, 17 aa, synthetic construct
  source 1..17: note = TPP-6850 - vhCDR2
TIFPGNGDTSYNQKFKD

SEQ ID NO: 731 - protein, 10 aa, synthetic construct
  source 1..10: note = TPP-6850 - vhCDR3
WDDGNVGFAH

SEQ ID NO: 732 - protein, 107 aa, synthetic construct
  source 1..107: note = TPP-6850 - Variable light (vl) domain
DIQMTQSPSSLSASVGDRVTITCRASENINNYLTWFQQKPGKAPKLLVYHAKTLAEGVPSRFSGSGSGTQFTLTISSLQPEDFATYYCQHHYGTPPTFGQGTKLEIK

SEQ ID NO: 733 - protein, 11 aa, synthetic construct
  source 1..11: note = TPP-6850 - vlCDR1
RASENINNYLT

SEQ ID NO: 734 - protein, 7 aa, synthetic construct
  source 1..7: note = TPP-6850 - vlCDR2
HAKTLAE

SEQ ID NO: 735 - protein, 9 aa, synthetic construct
  source 1..9: note = TPP-6850 - vlCDR3
QHHYGTPPT

SEQ ID NO: 736 - protein, 118 aa, synthetic construct
  source 1..118: note = TPP-3803 - Variable heavy (vh) domain
QVKLQQSGAELVKPGASVKLSCKASGYTFTNYDINWVRQRPEQGLEWIGWIFPGDGSTQYNEKFKGKATLTTDTSSSTAYMQLSRLTSEDSAVYFCARQTTATWFAYWGQGTTVTVSS

SEQ ID NO: 737 - protein, 5 aa, synthetic construct
  source 1..5: note = TPP-3803 - vhCDR1
NYDIN

SEQ ID NO: 738 - protein, 17 aa, synthetic construct
  source 1..17: note = TPP-3803 - vhCDR2
WIFPGDGSTQYNEKFKG

SEQ ID NO: 739 - protein, 9 aa, synthetic construct
  source 1..9: note = TPP-3803 - vhCDR3
QTTATWFAY

SEQ ID NO: 740 - protein, 107 aa, synthetic construct
  source 1..107: note = TPP-3803 - Variable light (vl) domain
DIELTQSPTTLSVTPGDRVSLSCRASQSISDYLHWYQQKSHESPRLLIKYASQSISGIPSRFSGSGSGSDFTLSINSVEPEDVGVYYCQNGHSFPLTFGAGTKLELK

SEQ ID NO: 741 - protein, 11 aa, synthetic construct
  source 1..11: note = TPP-3803 - vlCDR1
RASQSISDYLH

SEQ ID NO: 742 - protein, 7 aa, synthetic construct
  source 1..7: note = TPP-3803 - vlCDR2
YASQSIS

SEQ ID NO: 743 - protein, 9 aa, synthetic construct
  source 1..9: note = TPP-3803 - vlCDR3
QNGHSFPLT

SEQ ID NO: 744 - protein, 115 aa, synthetic construct
  source 1..115: note = TRL4542 - Variable heavy (vh) domain
QVQLVESGGDLVQPGESLRLSCAASGFIFSDAWMVWVRQAPGKGLEWVGRIKTNGDGGTTDLTEPVKGRFTISRDDSKNMVYLQMNNLRTEDTAIYYCTTAPGFWGQGTLVTVSS

SEQ ID NO: 745 - protein, 5 aa, synthetic construct
  source 1..5: note = TRL4542 - vhCDR1
DAWMV

SEQ ID NO: 746 - protein, 19 aa, synthetic construct
  source 1..19: note = TRL4542 - vhCDR2
RIKTNGDGGTTDLTEPVKG

SEQ ID NO: 747 - protein, 4 aa, synthetic construct
  source 1..4: note = TRL4542 - vhCDR3
APGF

SEQ ID NO: 748 - protein, 113 aa, synthetic construct
  source 1..113: note = TRL4542 - Variable light (vl) domain
DIEMTQSPDSLAVSLGERATINCKSSHNLLYKSNNKNYLAWSQQKPGQPPRLLIYWASTRDSGVPDRFSGSGSGTDFTLTISSLQAEDVAVYYCHQYYGTKWTFGQGTRVEIK

SEQ ID NO: 749 - protein, 17 aa, synthetic construct
  source 1..17: note = TRL4542 - vlCDR1
KSSHNLLYKSNNKNYLA

SEQ ID NO: 750 - protein, 7 aa, synthetic construct
  source 1..7: note = TRL4542 - vlCDR2
WASTRDS

SEQ ID NO: 751 - protein, 9 aa, synthetic construct
  source 1..9: note = TRL4542 - vlCDR3
HQYYGTKWT

SEQ ID NO: 752 - protein, 119 aa, synthetic construct
  source 1..119: note = h1702 - Variable heavy (vh) domain
QVQLVQSGGGVVQPGTSLRLSCAASGFIFSSSAMHWVRQAPGKGLEWVAVISYDGSNKYYVDSVKGRFTISRDNSKNTLYLQMNSLRAEDTAVYYCARSARLYASFDYWGQGALVTVSS

SEQ ID NO: 753 - protein, 5 aa, synthetic construct
  source 1..5: note = h1702 - vhCDR1
SSAMH

SEQ ID NO: 754 - protein, 17 aa, synthetic construct
  source 1..17: note = h1702 - vhCDR2
VISYDGSNKYYVDSVKG

SEQ ID NO: 755 - protein, 10 aa, synthetic construct
  source 1..10: note = h1702 - vhCDR3
SARLYASFDY

SEQ ID NO: 756 - protein, 110 aa, synthetic construct
  source 1..110: note = h1702 - Variable light (vl) domain
QTVVTQEPSFSVSPGGTVTLTCGLSSGSVSTSHYPSWYQQTPGQAPRMLIYNTNTRSSGVPDRFSGSILGNKAALTITGAQADDESDYYCAIHVDRDIWVFGGGTKLTVL

SEQ ID NO: 757 - protein, 14 aa, synthetic construct
  source 1..14: note = h1702 - vlCDR1
GLSSGSVSTSHYPS

SEQ ID NO: 758 - protein, 7 aa, synthetic construct
  source 1..7: note = h1702 - vlCDR2
NTNTRSS

SEQ ID NO: 759 - protein, 10 aa, synthetic construct
  source 1..10: note = h1702 - vlCDR3
AIHVDRDIWV

SEQ ID NO: 760 - protein, 119 aa, synthetic construct
  source 1..119: note = h1703 - Variable heavy (vh) domain
QVQLQESGGGLVQPGGSLRLSCAASGFTFSSYAMSWVRQAPGKGLEWVSAISGSGGSTYYADSVKGRYTISRDNSKNTLYLQMNSLRAEDTAVYYCAKGVGPVHALDVWGQGTTVTVSS

SEQ ID NO: 761 - protein, 5 aa, synthetic construct
  source 1..5: note = h1703 - vhCDR1
SYAMS

SEQ ID NO: 762 - protein, 17 aa, synthetic construct
  source 1..17: note = h1703 - vhCDR2
AISGSGGSTYYADSVKG

SEQ ID NO: 763 - protein, 10 aa, synthetic construct
  source 1..10: note = h1703 - vhCDR3
GVGPVHALDV

SEQ ID NO: 764 - protein, 108 aa, synthetic construct
  source 1..108: note = h1703 - Variable light (vl) domain
DIRLTQSPSSLSASVGDRVTITCRASQSISTYLNWYQQKPGKAPILLINAVSGLQSGVPSRFSGSGSGTHFTLTITSLQPEDFATYYCQQSYSTPMWTFGQGTKVEIK

SEQ ID NO: 765 - protein, 11 aa, synthetic construct
  source 1..11: note = h1703 - vlCDR1
RASQSISTYLN

SEQ ID NO: 766 - protein, 7 aa, synthetic construct
  source 1..7: note = h1703 - vlCDR2
AVSGLQS

SEQ ID NO: 767 - protein, 10 aa, synthetic construct
  source 1..10: note = h1703 - vlCDR3
QQSYSTPMWT

SEQ ID NO: 768 - protein, 118 aa, synthetic construct
  source 1..118: note = huA3 - Variable heavy (vh) domain
EVQLVESGGGLVKPGGSLRLSCAASGFTFSRYGMSWVRQAPGKGLEWVSAISSGGGSIYYPDTVKGRLTISRDNAKNTLYLQMNSLRAEDTAVYYCTRHYLLFEMDYWGQGTTVTVSS

SEQ ID NO: 769 - protein, 5 aa, synthetic construct
  source 1..5: note = huA3 - vhCDR1
RYGMS

SEQ ID NO: 770 - protein, 17 aa, synthetic construct
  source 1..17: note = huA3 - vhCDR2
AISSGGGSIYYPDTVKG

SEQ ID NO: 771 - protein, 9 aa, synthetic construct
  source 1..9: note = huA3 - vhCDR3
HYLLFEMDY

SEQ ID NO: 772 - protein, 106 aa, synthetic construct
  source 1..106: note = huA3 - Variable light (vl) domain
DIVLTQSPSFLSASVGDRVTITCKASQNVNTAVAWYQQKPGKAPKLLIFSASNRYTGVPSRFSGSGSGTDFTLTISSLQPEDVAAYFCQQYSSSLTFGGGTKLEIK

SEQ ID NO: 773 - protein, 11 aa, synthetic construct
  source 1..11: note = huA3 - vlCDR1
KASQNVNTAVA

SEQ ID NO: 774 - protein, 7 aa, synthetic construct
  source 1..7: note = huA3 - vlCDR2
SASNRYT

SEQ ID NO: 775 - protein, 8 aa, synthetic construct
  source 1..8: note = huA3 - vlCDR3
QQYSSSLT

SEQ ID NO: 776 - protein, 124 aa, synthetic construct
  source 1..124: note = huA9 - Variable heavy (vh) domain
QVQLVQSGAEVKKPGASVKVSCKASGYTFTDYAMHWVKQAPGQGLEWMGVISTYYGNTNYNQKFKGRVTMTVDKSISTAYMELSRLRSDDTAVYYCARPVTTMVPRGGYYFDYWGQGTTVTVSS

SEQ ID NO: 777 - protein, 5 aa, synthetic construct
  source 1..5: note = huA9 - vhCDR1
DYAMH

SEQ ID NO: 778 - protein, 17 aa, synthetic construct
  source 1..17: note = huA9 - vhCDR2
VISTYYGNTNYNQKFKG

SEQ ID NO: 779 - protein, 15 aa, synthetic construct
  source 1..15: note = huA9 - vhCDR3
PVTTMVPRGGYYFDY

SEQ ID NO: 780 - protein, 107 aa, synthetic construct
  source 1..107: note = huA9 - Variable light (vl) domain
DIQLTQSPSFLSASVGDRVTITCRASKSINKYLAWYQQKPGKAPKLLIYSGSTLQSGVPSRFSGSGSGTEFTLTISSLQPEDFATYYCQQHNEYPLTFGQGTKLEIK

SEQ ID NO: 781 - protein, 11 aa, synthetic construct
  source 1..11: note = huA9 - vlCDR1
RASKSINKYLA

SEQ ID NO: 782 - protein, 7 aa, synthetic construct
  source 1..7: note = huA9 - vlCDR2
SGSTLQS

SEQ ID NO: 783 - protein, 9 aa, synthetic construct
  source 1..9: note = huA9 - vlCDR3
QQHNEYPLT

SEQ ID NO: 784 - protein, 118 aa, synthetic construct
  source 1..118: note = m1704 - Variable heavy (vh) domain
EVQLVESGGGLVKSGGSLKLSCAASGFTFSRYGMSWVRQTPEKRLEWVAAISSNGGSIYYPDTVKGRLTISRDNAKNTLYLQMISLRSEDTALYFCTRHYLLFEMDYWGRGTSVTVSS

SEQ ID NO: 785 - protein, 5 aa, synthetic construct
  source 1..5: note = m1704 - vhCDR1
RYGMS

SEQ ID NO: 786 - protein, 17 aa, synthetic construct
  source 1..17: note = m1704 - vhCDR2
AISSNGGSIYYPDTVKG

SEQ ID NO: 787 - protein, 9 aa, synthetic construct
  source 1..9: note = m1704 - vhCDR3
HYLLFEMDY

SEQ ID NO: 788 - protein, 106 aa, synthetic construct
  source 1..106: note = m1704 - Variable light (vl) domain
DIVMTQSQEFMSTTVGDRVYITCKASQNVNTAVAWYQQKPGQSPKLLIFSASNRYTGVPDRFTGSGSGTDFTLTISNVQSEDLAAYFCQQYSSSLTFGAGTKLELK

SEQ ID NO: 789 - protein, 11 aa, synthetic construct
  source 1..11: note = m1704 - vlCDR1
KASQNVNTAVA

SEQ ID NO: 790 - protein, 7 aa, synthetic construct
  source 1..7: note = m1704 - vlCDR2
SASNRYT

SEQ ID NO: 791 - protein, 8 aa, synthetic construct
  source 1..8: note = m1704 - vlCDR3
QQYSSSLT

SEQ ID NO: 792 - protein, 217 aa, synthetic construct
  source 1..217: note = Heterodimeric Fc Backbone 1 monomer 1 (-)
APELLGGPSVFLFPPKPKDTLMISRTPEVTCVVVDVSHEDPEVKFNWYVDGVEVHNAKTKPREEEYNSTYRVVSVLTVLHQDWLNGKEYKCKVSNKALPAPIEKTISKAKGQPREPQVYTLPPSREEMTKNQVSLTCDVSGFYPSDIAVEWESDGQPENNYKTTPPVLDSDGSFFLYSKLTVDKSRWEQGDVFSCSVMHEALHNHYTQKSLSLSPGK

SEQ ID NO: 793 - protein, 217 aa, synthetic construct
  source 1..217: note = Heterodimeric Fc Backbone 1 monomer 2 (+)
APELLGGPSVFLFPPKPKDTLMISRTPEVTCVVVDVSHEDPEVKFNWYVDGVEVHNAKTKPREEQYNSTYRVVSVLTVLHQDWLNGKEYKCKVSNKALPAPIEKTISKAKGQPREPQVYTLPPSREQMTKNQVKLTCLVKGFYPSDIAVEWESNGQPENNYKTTPPVLDSDGSFFLYSKLTVDKSRWQQGNVFSCSVMHEALHNHYTQKSLSLSPGK

SEQ ID NO: 794 - protein, 217 aa, synthetic construct; identical to SEQ ID NO: 792
  source 1..217: note = Heterodimeric Fc Backbone 2 monomer 1 (-)

SEQ ID NO: 795 - protein, 217 aa, synthetic construct
  source 1..217: note = Heterodimeric Fc Backbone monomer 2 (+)
APELLGGPSVFLFPPKPKDTLMISRTPEVTCVVVDVSHEDPEVKFNWYVDGVEVHNAKTKPREEQYNSTYRVVSVLTVLHQDWLNGKEYKCKVSNKALPAPIEKTISKAKGQPREPQVYTLPPSREEMTKNQVKLTCLVKGFYPSDIAVEWESNGQPENNYKTTPPVLDSDGSFFLYSKLTVDKSRWQQGNVFSCSVMHEALHNHYTQKSLSLSPGK

SEQ ID NO: 796 - protein, 217 aa, synthetic construct
  source 1..217: note = Heterodimeric Fc Backbone 3 monomer 1 (-)
APELLGGPSVFLFPPKPKDTLMISRTPEVTCVVVDVSHEDPEVKFNWYVDGVEVHNAKTKPREEEYNSTYRVVSVLTVLHQDWLNGKEYKCKVSNKALPAPIEKTISKAKGQPREPQVYTLPPSREEMTKNQVSLTCEVSGFYPSDIAVEWESDGQPENNYKTTPPVLDSDGSFFLYSKLTVDKSRWEQGDVFSCSVMHEALHNHYTQKSLSLSPGK

SEQ ID NO: 797 - protein, 217 aa, synthetic construct; identical to SEQ ID NO: 795
  source 1..217: note = Heterodimeric Fc Backbone 3 monomer 2 (+)

SEQ ID NO: 798 - protein, 217 aa, synthetic construct
  source 1..217: note = Heterodimeric Fc Backbone 4 monomer 1 (-)
APELLGGPSVFLFPPKPKDTLMISRTPEVTCVVVDVSHEDPEVKFNWYVDGVEVHNAKTKPREEEYNSTYRVVSVLTVLHQDWLNGKEYKCKVSNKALPAPIEKTISKAKGQPREPQVYTLPPSREEMTENEVSLTCLVKGFYPSDIAVEWESDGQPENNYKTTPPVLDSDGSFFLYSKLEVDKSRWEQGDVFSCSVMHEALHNHYTQKSLSLSPGK

SEQ ID NO: 799 - protein, 217 aa, synthetic construct
  source 1..217: note = Heterodimeric Fc Backbone 4 monomer 2 (+)
APELLGGPSVFLFPPKPKDTLMISRTPEVTCVVVDVSHEDPEVKFNWYVDGVEVHNAKTKPREEQYNSTYRVVSVLTVLHQDWLNGKEYKCKVSNKALPAPIEKTISKAKGQPREPQVYTLPPSREEMTKNQVSLTCLVKGFYPSDIAVEWESNGQPENNYKTTPPVLDSKGSFFLYSKLTVDKSRWQQGNVFSCSVMHEALHNHYTQKSLSLSPGK

SEQ ID NO: 800 - protein, 584 aa, synthetic construct
  source 1..584: note = Cynomolgus B7H3 sequence
MKLSSDHVFPLFRKLQWLPAAFRIQFTPVSPSAGAAFHHGEPSCQLPHSKMLHRRGSPGMGVHVGAALGALWFCLTGALEVQVPEDPVVALVGTDATLRCSFSPEPGFSLAQLNLIWQLTDTKQLVHSFTEGRDQGSAYANRTALFLDLLAQGNASLRLQRVRVADEGSFTCFVSIRDFGSAAVSLQVAAPYSKPSMTLEPNKDLRPGDTVTITCSSYRGYPEAEVFWQDGQGAPLTGNVTTSQMANEQGLFDVHSVLRVVLGANGTYSCLVRNPVLQQDAHGSITITPQRSPTGAVEVQVPEDPVVALVGTDATLRCSFSPEPGFSLAQLNLIWQLTDTKQLVHSFTEGRDQGSAYANRTALFLDLLAQGNASLRLQRVRVADEGSFTCFVSIRDFGSAAVSLQVAAPYSKPSMTLEPNKDLRPGDTVTITCSSYRGYPEAEVFWQDGQGAPLTGNVTTSQMANEQGLFDVHSVLRVVLGANGTYSCLVRNPVLQQDAHGSVTITGQPMTFPPEALWVTVGLSVCLVALLVALAFVCWRKIKQSCEEENAGAEDQDGEGEGSKTALQPLKHSDSKEDDGQELA

SEQ ID NO: 801 - protein, 217 aa, synthetic construct
  source 1..217: note = Heterodimeric Fc Backbone 5 monomer 1 (-)
APELLGGPSVFLFPPKPKDTLMISRTPEVTCVVVDVSHEDPEVKFNWYVDGVEVHNAKTKPREEEYNSTYRVVSVLTVLHQDWLNGKEYKCKVSNKALPAPIEKTISKAKGQPREPQVYTLPPSRDELTKNQVSLTCDVSGFYPSDIAVEWESDGQPENNYKTTPPVLDSDGSFFLYSKLTVDKSRWEQGDVFSCSVMHEALHNHYTQKSLSLSPGK

SEQ ID NO: 802 - protein, 217 aa, synthetic construct
  source 1..217: note = Heterodimeric Fc Backbone 5 monomer 2 (+)
APELLGGPSVFLFPPKPKDTLMISRTPEVTCVVVDVSHEDPEVKFNWYVDGVEVHNAKTKPREEQYNSTYRVVSVLTVLHQDWLNGKEYKCKVSNKALPAPIEKTISKAKGQPREPQVYTLPPSRDQLTKNQVKLTCLVKGFYPSDIAVEWESNGQPENNYKTTPPVLDSDGSFFLYSKLTVDKSRWQQGNVFSCSVMHEALHNHYTQKSLSLSPGK

SEQ ID NO: 803 - protein, 217 aa, synthetic construct
  source 1..217: note = Heterodimeric Fc Backbone 6 monomer 1 (-)
APELLGGPSVFLFPPKPKDTLMISRTPEVTCVVVDVSHEDPEVKFNWYVDGVEVHNAKTKPREEEYASTYRVVSVLTVLHQDWLNGKEYKCKVSNKALPAPIEKTISKAKGQPREPQVYTLPPSREEMTKNQVSLTCDVSGFYPSDIAVEWESDGQPENNYKTTPPVLDSDGSFFLYSKLTVDKSRWEQGDVFSCSVMHEALHNHYTQKSLSLSPGK

SEQ ID NO: 804 - protein, 217 aa, synthetic construct
  source 1..217: note = Heterodimeric Fc Backbone 6 monomer 2 (+)
APELLGGPSVFLFPPKPKDTLMISRTPEVTCVVVDVSHEDPEVKFNWYVDGVEVHNAKTKPREEQYASTYRVVSVLTVLHQDWLNGKEYKCKVSNKALPAPIEKTISKAKGQPREPQVYTLPPSREQMTKNQVKLTCLVKGFYPSDIAVEWESNGQPENNYKTTPPVLDSDGSFFLYSKLTVDKSRWQQGNVFSCSVMHEALHNHYTQKSLSLSPGK

SEQ ID NO: 805 - protein, 217 aa, synthetic construct
  source 1..217: note = Heterodimeric Fc Backbone 7 monomer 1 (-)
APELLGGPSVFLFPPKPKDTLMISRTPEVTCVVVDVSHEDPEVKFNWYVDGVEVHNAKTKPREEEYSSTYRVVSVLTVLHQDWLNGKEYKCKVSNKALPAPIEKTISKAKGQPREPQVYTLPPSREEMTKNQVSLTCDVSGFYPSDIAVEWESDGQPENNYKTTPPVLDSDGSFFLYSKLTVDKSRWEQGDVFSCSVMHEALHNHYTQKSLSLSPGK

SEQ ID NO: 806 - protein, 217 aa, synthetic construct
  source 1..217: note = Heterodimeric Fc Backbone 7 monomer 2 (+)
APELLGGPSVFLFPPKPKDTLMISRTPEVTCVVVDVSHEDPEVKFNWYVDGVEVHNAKTKPREEQYSSTYRVVSVLTVLHQDWLNGKEYKCKVSNKALPAPIEKTISKAKGQPREPQVYTLPPSREQMTKNQVKLTCLVKGFYPSDIAVEWESNGQPENNYKTTPPVLDSDGSFFLYSKLTVDKSRWQQGNVFSCSVMHEALHNHYTQKSLSLSPGK

SEQ ID NO: 807 - protein, 217 aa, synthetic construct
  source 1..217: note = Heterodimeric Fc Backbone 8 monomer 1 (-)
APELLGGPSVFLFPPKPKDTLMISRTPEVTCVVVDVSHEDPEVKFNWYVDGVEVHNAKTKPREEEYNSTYRVVSVLTVLHQDWLNGKEYKCKVSNKALPAPIEKTISKAKGQPREPQVYTLPPSREEMTKNQVSLTCDVSGFYPSDIAVEWESDGQPENNYKTTPPVLDSDGSFFLYSKLTVDKSRWEQGDVFSCSVLHEALHSHYTQKSLSLSPGK

SEQ ID NO: 808 - protein, 217 aa, synthetic construct
  source 1..217: note = Heterodimeric Fc Backbone 8 monomer 2 (+)
APELLGGPSVFLFPPKPKDTLMISRTPEVTCVVVDVSHEDPEVKFNWYVDGVEVHNAKTKPREEQYNSTYRVVSVLTVLHQDWLNGKEYKCKVSNKALPAPIEKTISKAKGQPREPQVYTLPPSREQMTKNQVKLTCLVKGFYPSDIAVEWESNGQPENNYKTTPPVLDSDGSFFLYSKLTVDKSRWQQGNVFSCSVLHEALHSHYTQKSLSLSPGK

SEQ ID NO: 809 - protein, 217 aa, synthetic construct
  source 1..217: note = Heterodimeric Fc Backbone 9 monomer 1
APELLGGPSVFLFPPKPKDTLMISRTPEVTCVVVDVSHEDPEVKFNWYVDGVEVHNAKTKPREEEYNSTYRVVSVLTVLHQDWLNGKEYKCKVSNKALPAPIEKTISKAKGQPREPQVYTLPPSRDELTKNQVSLTCDVSGFYPSDIAVEWESDGQPENNYKTTPPVLDSDGSFFLYSKLTVDKSRWEQGDVFSCSVLHEALHSHYTQKSLSLSPGK

SEQ ID NO: 810 - protein, 217 aa, synthetic construct
  source 1..217: note = Heterodimeric Fc Backbone 9 monomer 2
APELLGGPSVFLFPPKPKDTLMISRTPEVTCVVVDVSHEDPEVKFNWYVDGVEVHNAKTKPREEQYNSTYRVVSVLTVLHQDWLNGKEYKCKVSNKALPAPIEKTISKAKGQPREPQVYTLPPSRDQLTKNQVKLTCLVKGFYPSDIAVEWESNGQPENNYKTTPPVLDSDGSFFLYSKLTVDKSRWQQGNVFSCSVLHEALHSHYTQKSLSLSPGK

SEQ ID NO: 811 - protein, 217 aa, synthetic construct
  source 1..217: note = Heterodimeric Fc Backbone 10 monomer 1
APELLGGPSVFLFPPKPKDTLMISRTPEVTCVVVDVSHEDPEVKFNWYVDGVEVHNAKTKPREEEYNSTYRVVSVLTVLHQDWLNGKEYKCKVSNKALPAPIEKTISKAKGQPREPQVYTLPPSREEMTKNQVSLTCDVSGFYPSDIAVEWESDGQPENNYKTTPPVLDSDGSFFLYSKLTVDKSRWEQGDVFSCSVLHEALHAHYTQKSLSLSPGK

SEQ ID NO: 812 - protein, 217 aa, synthetic construct
  source 1..217: note = Heterodimeric Fc Backbone 10 monomer 2
APELLGGPSVFLFPPKPKDTLMISRTPEVTCVVVDVSHEDPEVKFNWYVDGVEVHNAKTKPREEQYNSTYRVVSVLTVLHQDWLNGKEYKCKVSNKALPAPIEKTISKAKGQPREPQVYTLPPSREQMTKNQVKLTCLVKGFYPSDIAVEWESNGQPENNYKTTPPVLDSDGSFFLYSKLTVDKSRWQQGNVFSCSVLHEALHAHYTQKSLSLSPGK

SEQ ID NO: 813 - protein, 217 aa, synthetic construct
  source 1..217: note = Heterodimeric Fc Backbone 11 monomer 1
APELLGGPSVFLFPPKPKDTLMISRTPEVTCVVVDVSHEDPEVKFNWYVDGVEVHNAKTKPREEEYNSTYRVVSVLTVLHQDWLNGKEYKCKVSNKALPAPIEKTISKAKGQPREPQVYTLPPSRDELTKNQVSLTCDVSGFYPSDIAVEWESDGQPENNYKTTPPVLDSDGSFFLYSKLTVDKSRWEQGDVFSCSVLHEALHAHYTQKSLSLSPGK

SEQ ID NO: 814 - protein, 217 aa, synthetic construct
  source 1..217: note = Heterodimeric Fc Backbone 11 monomer 2
APELLGGPSVFLFPPKPKDTLMISRTPEVTCVVVDVSHEDPEVKFNWYVDGVEVHNAKTKPREEQYNSTYRVVSVLTVLHQDWLNGKEYKCKVSNKALPAPIEKTISKAKGQPREPQVYTLPPSRDQLTKNQVKLTCLVKGFYPSDIAVEWESNGQPENNYKTTPPVLDSDGSFFLYSKLTVDKSRWQQGNVFSCSVLHEALHAHYTQKSLSLSPGK

SEQ ID NO: 815 - protein, 217 aa, synthetic construct
  source 1..217: note = S239D/I332E : S239D/I332E - ADCC-enhanced Heterodimeric Backbone 1 monomer 1 (-)
APELLGGPDVFLFPPKPKDTLMISRTPEVTCVVVDVSHEDPEVKFNWYVDGVEVHNAKTKPREEEYNSTYRVVSVLTVLHQDWLNGKEYKCKVSNKALPAPEEKTISKAKGQPREPQVYTLPPSREEMTKNQVSLTCDVSGFYPSDIAVEWESDGQPENNYKTTPPVLDSDGSFFLYSKLTVDKSRWEQGDVFSCSVMHEALHNHYTQKSLSLSPGK

SEQ ID NO: 816 - protein, 217 aa, synthetic construct
  source 1..217: note = S239D/I332E : S239D/I332E - ADCC-enhanced Heterodimeric Backbone 1 monomer 2 (+)
APELLGGPDVFLFPPKPKDTLMISRTPEVTCVVVDVSHEDPEVKFNWYVDGVEVHNAKTKPREEQYNSTYRVVSVLTVLHQDWLNGKEYKCKVSNKALPAPEEKTISKAKGQPREPQVYTLPPSREQMTKNQVKLTCLVKGFYPSDIAVEWESNGQPENNYKTTPPVLDSDGSFFLYSKLTVDKSRWQQGNVFSCSVMHEALHNHYTQKSLSLSPGK

SEQ ID NO: 817 - protein, 217 aa, synthetic construct
  source 1..217: note = S239D : S239D - ADCC-enhanced Heterodimeric Backbone 2 monomer 1 (-)
APELLGGPDVFLFPPKPKDTLMISRTPEVTCVVVDVSHEDPEVKFNWYVDGVEVHNAKTKPREEEYNSTYRVVSVLTVLHQDWLNGKEYKCKVSNKALPAPIEKTISKAKGQPREPQVYTLPPSREEMTKNQVSLTCDVSGFYPSDIAVEWESDGQPENNYKTTPPVLDSDGSFFLYSKLTVDKSRWEQGDVFSCSVMHEALHNHYTQKSLSLSPGK

SEQ ID NO: 818 - protein, 217 aa, synthetic construct
  source 1..217: note = S239D : S239D - ADCC-enhanced Heterodimeric Backbone 2 monomer 2 (+)
APELLGGPDVFLFPPKPKDTLMISRTPEVTCVVVDVSHEDPEVKFNWYVDGVEVHNAKTKPREEQYNSTYRVVSVLTVLHQDWLNGKEYKCKVSNKALPAPIEKTISKAKGQPREPQVYTLPPSREQMTKNQVKLTCLVKGFYPSDIAVEWESNGQPENNYKTTPPVLDSDGSFFLYSKLTVDKSRWQQGNVFSCSVMHEALHNHYTQKSLSLSPGK

SEQ ID NO: 819 - protein, 217 aa, synthetic construct
  source 1..217: note = I332E : I332E - ADCC-enhanced Heterodimeric Backbone 3 monomer 1 (-)
APELLGGPSVFLFPPKPKDTLMISRTPEVTCVVVDVSHEDPEVKFNWYVDGVEVHNAKTKPREEEYNSTYRVVSVLTVLHQDWLNGKEYKCKVSNKALPAPEEKTISKAKGQPREPQVYTLPPSREEMTKNQVSLTCDVSGFYPSDIAVEWESDGQPENNYKTTPPVLDSDGSFFLYSKLTVDKSRWEQGDVFSCSVMHEALHNHYTQKSLSLSPGK

SEQ ID NO: 820 - protein, 217 aa, synthetic construct
  source 1..217: note = I332E : I332E - ADCC-enhanced Heterodimeric Backbone 3 monomer 2 (+)
APELLGGPSVFLFPPKPKDTLMISRTPEVTCVVVDVSHEDPEVKFNWYVDGVEVHNAKTKPREEQYNSTYRVVSVLTVLHQDWLNGKEYKCKVSNKALPAPEEKTISKAKGQPREPQVYTLPPSREQMTKNQVKLTCLVKGFYPSDIAVEWESNGQPENNYKTTPPVLDSDGSFFLYSKLTVDKSRWQQGNVFSCSVMHEALHNHYTQKSLSLSPGK

SEQ ID NO: 821 - protein, 217 aa, synthetic construct; identical to SEQ ID NO: 792
  source 1..217: note = WT : S239D/I332E - ADCC-enhanced Heterodimeric Backbone 4 monomer 1 (-)

SEQ ID NO: 822 - protein, 217 aa, synthetic construct; identical to SEQ ID NO: 816
  source 1..217: note = WT : S239D/I332E - ADCC-enhanced Heterodimeric Backbone 4 monomer 2 (+)

SEQ ID NO: 823 - protein, 217 aa, synthetic construct; identical to SEQ ID NO: 792
  source 1..217: note = WT : S239D - ADCC-enhanced Heterodimeric Backbone 5 monomer 1 (-)

SEQ ID NO: 824 - protein, 217 aa, synthetic construct; identical to SEQ ID NO: 818
  source 1..217: note = WT : S239D - ADCC-enhanced Heterodimeric Backbone 5 monomer 2 (+)

SEQ ID NO: 825 - protein, 217 aa, synthetic construct; identical to SEQ ID NO: 792
  source 1..217: note = WT : I332E - ADCC-enhanced Heterodimeric Backbone 6 monomer 1 (-)

SEQ ID NO: 826 - protein, 217 aa, synthetic construct; identical to SEQ ID NO: 820
  source 1..217: note = WT : I332E - ADCC-enhanced Heterodimeric Backbone 6 monomer 2 (+)

SEQ ID NO: 827 - protein, 217 aa, synthetic construct; identical to SEQ ID NO: 815
  source 1..217: note = S239D/I332E : WT - ADCC-enhanced Heterodimeric Backbone 7 monomer 1 (-)

SEQ ID NO: 828 - protein, 217 aa, synthetic construct; identical to SEQ ID NO: 793
  source 1..217: note = S239D/I332E : WT - ADCC-enhanced Heterodimeric Backbone 7 monomer 2 (+)

SEQ ID NO: 829 - protein, 217 aa, synthetic construct; identical to SEQ ID NO: 817
  source 1..217: note = S239D : WT - ADCC-enhanced Heterodimeric Backbone 8 monomer 1 (-)

SEQ ID NO: 830 - protein, 217 aa, synthetic construct; identical to SEQ ID NO: 793
  source 1..217: note = S239D : WT - ADCC-enhanced Heterodimeric Backbone 8 monomer 2 (+)

SEQ ID NO: 831 - protein, 217 aa, synthetic construct; identical to SEQ ID NO: 819
  source 1..217: note = I332E : WT - ADCC-enhanced Heterodimeric Backbone 9 monomer 1 (-)

SEQ ID NO: 832 - protein, 217 aa, synthetic construct; identical to SEQ ID NO: 793
  source 1..217: note = I332E : WT - ADCC-enhanced Heterodimeric Backbone 9 monomer 2 (+)

SEQ ID NO: 833 - protein, 217 aa, synthetic construct; identical to SEQ ID NO: 815
  source 1..217: note = S239D/I332E : S239D - ADCC-enhanced Heterodimeric Backbone 10 monomer 1 (-)

SEQ ID NO: 834 - protein, 217 aa, synthetic construct; identical to SEQ ID NO: 818
  source 1..217: note = S239D/I332E : S239D - ADCC-enhanced Heterodimeric Backbone 10 monomer 2 (+)

SEQ ID NO: 835 - protein, 217 aa, synthetic construct; identical to SEQ ID NO: 815
  source 1..217: note = S239D/I332E : I332E - ADCC-enhanced Heterodimeric Backbone 11 monomer 1 (-)

SEQ ID NO: 836 - protein, 217 aa, synthetic construct; identical to SEQ ID NO: 820
  source 1..217: note = S239D/I332E : I332E - ADCC-enhanced Heterodimeric Backbone 11 monomer 2 (+)

SEQ ID NO: 837 - protein, 217 aa, synthetic construct; identical to SEQ ID NO: 817
  source 1..217: note = S239D : S239D/I332E - ADCC-enhanced Heterodimeric Backbone 12 monomer 1 (-)

SEQ ID NO: 838 - protein, 217 aa, synthetic construct; identical to SEQ ID NO: 816
  source 1..217: note = S239D : S239D/I332E - ADCC-enhanced Heterodimeric Backbone 12 monomer 2 (+)

SEQ ID NO: 839 - protein, 217 aa, synthetic construct; identical to SEQ ID NO: 819
  source 1..217: note = I332E : S239D/I332E - ADCC-enhanced Heterodimeric Backbone 13 monomer 1 (-)

SEQ ID NO: 840 - protein, 217 aa, synthetic construct; identical to SEQ ID NO: 816
  source 1..217: note = I332E : S239D/I332E - ADCC-enhanced Heterodimeric Backbone 13 monomer 2 (+)

SEQ ID NO: 841 - protein, 217 aa, synthetic construct; identical to SEQ ID NO: 817
  source 1..217: note = S239D : I332E - ADCC-enhanced Heterodimeric Backbone 14 monomer 1 (-)

SEQ ID NO: 842 - protein, 217 aa, synthetic construct; identical to SEQ ID NO: 820
  source 1..217: note = S239D : I332E - ADCC-enhanced Heterodimeric Backbone 14 monomer 2 (+)

SEQ ID NO: 843 - protein, 217 aa, synthetic construct; identical to SEQ ID NO: 819
  source 1..217: note = I332E : S239D - ADCC-enhanced Heterodimeric Backbone 15 monomer 1 (-)

SEQ ID NO: 844 - protein, 217 aa, synthetic construct; identical to SEQ ID NO: 818
  source 1..217: note = I332E : S239D - ADCC-enhanced Heterodimeric Backbone 15 monomer 2 (+)

SEQ ID NO: 845 - protein, 217 aa, synthetic construct
  source 1..217: note = S239D/I332E : S239D/I332E - ADCC-enhanced Heterodimeric Backbone 1 w/ Xtend monomer 1 (-)
APELLGGPDVFLFPPKPKDTLMISRTPEVTCVVVDVSHEDPEVKFNWYVDGVEVHNAKTKPREEEYNSTYRVVSVLTVLHQDWLNGKEYKCKVSNKALPAPEEKTISKAKGQPREPQVYTLPPSREEMTKNQVSLTCDVSGFYPSDIAVEWESDGQPENNYKTTPPVLDSDGSFFLYSKLTVDKSRWEQGDVFSCSVLHEALHSHYTQKSLSLSPGK

SEQ ID NO: 846 - protein, 217 aa, synthetic construct
  source 1..217: note = S239D/I332E : S239D/I332E - ADCC-enhanced Heterodimeric Backbone 1 w/ Xtend monomer 2 (+)
APELLGGPDVFLFPPKPKDTLMISRTPEVTCVVVDVSHEDPEVKFNWYVDGVEVHNAKTKPREEQYNSTYRVVSVLTVLHQDWLNGKEYKCKVSNKALPAPEEKTISKAKGQPREPQVYTLPPSREQMTKNQVKLTCLVKGFYPSDIAVEWESNGQPENNYKTTPPVLDSDGSFFLYSKLTVDKSRWQQGNVFSCSVLHEALHSHYTQKSLSLSPGK

SEQ ID NO: 847 - protein, 217 aa, synthetic construct
  source 1..217: note = S239D : S239D - ADCC-enhanced Heterodimeric Backbone 2 w/ Xtend monomer 1 (-)
APELLGGPDVFLFPPKPKDTLMISRTPEVTCVVVDVSHEDPEVKFNWYVDGVEVHNAKTKPREEEYNSTYRVVSVLTVLHQDWLNGKEYKCKVSNKALPAPIEKTISKAKGQPREPQVYTLPPSREEMTKNQVSLTCDVSGFYPSDIAVEWESDGQPENNYKTTPPVLDSDGSFFLYSKLTVDKSRWEQGDVFSCSVLHEALHSHYTQKSLSLSPGK

SEQ ID NO: 848 - protein, 217 aa, synthetic construct
  source 1..217: note = S239D : S239D - ADCC-enhanced Heterodimeric Backbone 2 w/ Xtend monomer 2 (+)
APELLGGPDVFLFPPKPKDTLMISRTPEVTCVVVDVSHEDPEVKFNWYVDGVEVHNAKTKPREEQYNSTYRVVSVLTVLHQDWLNGKEYKCKVSNKALPAPIEKTISKAKGQPREPQVYTLPPSREQMTKNQVKLTCLVKGFYPSDIAVEWESNGQPENNYKTTPPVLDSDGSFFLYSKLTVDKSRWQQGNVFSCSVLHEALHSHYTQKSLSLSPGK

SEQ ID NO: 849 - protein, 217 aa, synthetic construct
  source 1..217: note = I332E : I332E - ADCC-enhanced Heterodimeric Backbone 3 w/ Xtend monomer 1 (-)
APELLGGPSVFLFPPKPKDTLMISRTPEVTCVVVDVSHEDPEVKFNWYVDGVEVHNAKTKPREEEYNSTYRVVSVLTVLHQDWLNGKEYKCKVSNKALPAPEEKTISKAKGQPREPQVYTLPPSREEMTKNQVSLTCDVSGFYPSDIAVEWESDGQPENNYKTTPPVLDSDGSFFLYSKLTVDKSRWEQGDVFSCSVLHEALHSHYTQKSLSLSPGK

SEQ ID NO: 850 - protein, 217 aa, synthetic construct
  source 1..217: note = I332E : I332E - ADCC-enhanced Heterodimeric Backbone 3 w/ Xtend monomer 2 (+)
APELLGGPSVFLFPPKPKDTLMISRTPEVTCVVVDVSHEDPEVKFNWYVDGVEVHNAKTKPREEQYNSTYRVVSVLTVLHQDWLNGKEYKCKVSNKALPAPEEKTISKAKGQPREPQVYTLPPSREQMTKNQVKLTCLVKGFYPSDIAVEWESNGQPENNYKTTPPVLDSDGSFFLYSKLTVDKSRWQQGNVFSCSVLHEALHSHYTQKSLSLSPGK

SEQ ID NO: 851 - protein, 217 aa, synthetic construct; identical to SEQ ID NO: 807
  source 1..217: note = WT : S239D/I332E - ADCC-enhanced Heterodimeric Backbone 4 w/ Xtend monomer 1 (-)

SEQ ID NO: 852 - protein, 217 aa, synthetic construct; identical to SEQ ID NO: 846
  source 1..217: note = WT : S239D/I332E - ADCC-enhanced Heterodimeric Backbone 4 w/ Xtend monomer 2 (+)

SEQ ID NO: 853 - protein, 217 aa, synthetic construct; identical to SEQ ID NO: 807
  source 1..217: note = WT : S239D - ADCC-enhanced Heterodimeric Backbone 5 w/ Xtend monomer 1 (-)

SEQ ID NO: 854 - protein, 217 aa, synthetic construct; identical to SEQ ID NO: 848
  source 1..217: note = WT : S239D - ADCC-enhanced Heterodimeric Backbone 5 w/ Xtend monomer 2 (+)

SEQ ID NO: 855 - protein, 217 aa, synthetic construct; identical to SEQ ID NO: 807
  source 1..217: note = WT : I332E - ADCC-enhanced Heterodimeric Backbone 6 w/ Xtend monomer 1 (-)

SEQ ID NO: 856 - protein, 217 aa, synthetic construct; identical to SEQ ID NO: 850
  source 1..217: note = WT : I332E - ADCC-enhanced Heterodimeric Backbone 6 w/ Xtend monomer 2 (+)

SEQ ID NO: 857 - protein, 217 aa, synthetic construct; identical to SEQ ID NO: 845
  source 1..217: note = S239D/I332E : WT - ADCC-enhanced Heterodimeric Backbone 7 w/ Xtend monomer 1 (-)

SEQ ID NO: 858 - protein, 217 aa, synthetic construct; identical to SEQ ID NO: 808
  source 1..217: note = S239D/I332E : WT - ADCC-enhanced Heterodimeric Backbone 7 w/ Xtend monomer 2 (+)

SEQ ID NO: 859 - protein, 217 aa, synthetic construct; identical to SEQ ID NO: 847
  source 1..217: note = S239D : WT - ADCC-enhanced Heterodimeric Backbone 8 w/ Xtend monomer 1 (-)

SEQ ID NO: 860 - protein, 217 aa, synthetic construct; identical to SEQ ID NO: 808
  source 1..217: note = S239D : WT - ADCC-enhanced Heterodimeric Backbone 8 w/ Xtend monomer 2 (+)

SEQ ID NO: 861 - protein, 217 aa, synthetic construct; identical to SEQ ID NO: 849
  source 1..217: note = I332E : WT - ADCC-enhanced Heterodimeric Backbone 9 w/ Xtend monomer 1 (-)

SEQ ID NO: 862 - protein, 217 aa, synthetic construct; identical to SEQ ID NO: 808
  source 1..217: note = I332E : WT - ADCC-enhanced Heterodimeric Backbone 9 w/ Xtend monomer 2 (+)

SEQ ID NO: 863 - protein, 217 aa, synthetic construct; identical to SEQ ID NO: 845
  source 1..217: note = S239D/I332E : S239D - ADCC-enhanced Heterodimeric Backbone 10 w/ Xtend monomer 1 (-)

SEQ ID NO: 864 - protein, 217 aa, synthetic construct; identical to SEQ ID NO: 848
  source 1..217: note = S239D/I332E : S239D - ADCC-enhanced Heterodimeric Backbone 10 w/ Xtend monomer 2 (+)

SEQ ID NO: 865 - protein, 217 aa, synthetic construct; identical to SEQ ID NO: 845
  source 1..217: note = S239D/I332E : I332E - ADCC-enhanced Heterodimeric Backbone 11 w/ Xtend monomer 1 (-)

SEQ ID NO: 866 - protein, 217 aa, synthetic construct; identical to SEQ ID NO: 850
  source 1..217: note = S239D/I332E : I332E - ADCC-enhanced Heterodimeric Backbone 11 w/ Xtend monomer 2 (+)

SEQ ID NO: 867 - protein, 217 aa, synthetic construct; identical to SEQ ID NO: 847
  source 1..217: note = S239D : S239D/I332E - ADCC-enhanced Heterodimeric Backbone 12 w/ Xtend monomer 1 (-)

SEQ ID NO: 868 - protein, 217 aa, synthetic construct; identical to SEQ ID NO: 846
  source 1..217: note = S239D : S239D/I332E - ADCC-enhanced Heterodimeric Backbone 12 w/ Xtend monomer 2 (+)

SEQ ID NO: 869 - protein, 217 aa, synthetic construct; identical to SEQ ID NO: 849
  source 1..217: note = I332E : S239D/I332E - ADCC-enhanced Heterodimeric Backbone 13 w/ Xtend monomer 1 (-)

SEQ ID NO: 870 - protein, 217 aa, synthetic construct; identical to SEQ ID NO: 846
  source 1..217: note = I332E : S239D/I332E - ADCC-enhanced Heterodimeric Backbone 13 w/ Xtend monomer 2 (+)

SEQ ID NO: 871 - protein, 217 aa, synthetic construct; identical to SEQ ID NO: 847
  source 1..217: note = S239D : I332E - ADCC-enhanced Heterodimeric Backbone 14 w/ Xtend monomer 1 (-)

SEQ ID NO: 872 - protein, 217 aa, synthetic construct; identical to SEQ ID NO: 850
  source 1..217: note = S239D : I332E - ADCC-enhanced Heterodimeric Backbone 14 w/ Xtend monomer 2 (+)

SEQ ID NO: 873 - protein, 217 aa, synthetic construct; identical to SEQ ID NO: 849
  source 1..217: note = I332E : S239D - ADCC-enhanced Heterodimeric Backbone 15 w/ Xtend monomer 1 (-)

SEQ ID NO: 874 - protein, 217 aa, synthetic construct; identical to SEQ ID NO: 848
  source 1..217: note = I332E : S239D - ADCC-enhanced Heterodimeric Backbone 15 w/ Xtend monomer 2 (+)

SEQ ID NO: 875 - protein, 216 aa, synthetic construct; identical to SEQ ID NO: 83
  source 1..216: note = 2 + 1 mAb-scFv Heterodimeric Fc Backbone (FcKO) - 2 + 1 mAb-scFv Heterodimeric Fc Backbone FcKO monomer 1 (-)

SEQ ID NO: 876 - protein, 215 aa, synthetic construct; identical to SEQ ID NO: 84
  source 1..215: note = 2 + 1 mAb-scFv Heterodimeric Fc Backbone (FcKO) - 2 + 1 mAb-scFv Heterodimeric Fc Backbone FcKO monomer 2 (+)

SEQ ID NO: 877 - protein, 217 aa, synthetic construct; identical to SEQ ID NO: 792
  source 1..217: note = 2 + 1 mAb-scFv  Heterodimeric Fc Backbone (WT effector) - Heterodimeric Fc Backbone 1 monomer 1 (-)

SEQ ID NO: 878 - protein, 216 aa, synthetic construct
  source 1..216: note = 2 + 1 mAb-scFv  Heterodimeric Fc Backbone (WT effector) - Heterodimeric Fc Backbone 1 monomer 2 (+)
APELLGGPSVFLFPPKPKDTLMISRTPEVTCVVVDVSHEDPEVKFNWYVDGVEVHNAKTKPREEQYNSTYRVVSVLTVLHQDWLNGKEYKCKVSNKALPAPIEKTISKAKGQPREPQVYTLPPSREQMTKNQVKLTCLVKGFYPSDIAVEWESNGQPENNYKTTPPVLDSDGSFFLYSKLTVDKSRWQQGNVFSCSVMHEALHNHYTQKSLSLSPG

SEQ ID NO: 879 - protein, 217 aa, synthetic construct; identical to SEQ ID NO: 815
  source 1..217: note = S239D/I332E : S239D/I332E - ADCC-enhanced Heterodimeric Backbone 1 monomer 1 (-)

SEQ ID NO: 880 - protein, 216 aa, synthetic construct
  source 1..216: note = S239D/I332E : S239D/I332E - ADCC-enhanced Heterodimeric Backbone 1 monomer 2 (+)
APELLGGPDVFLFPPKPKDTLMISRTPEVTCVVVDVSHEDPEVKFNWYVDGVEVHNAKTKPREEQYNSTYRVVSVLTVLHQDWLNGKEYKCKVSNKALPAPEEKTISKAKGQPREPQVYTLPPSREQMTKNQVKLTCLVKGFYPSDIAVEWESNGQPENNYKTTPPVLDSDGSFFLYSKLTVDKSRWQQGNVFSCSVMHEALHNHYTQKSLSLSPG

SEQ ID NO: 881 - protein, 217 aa, synthetic construct; identical to SEQ ID NO: 817
  source 1..217: note = S239D : S239D - ADCC-enhanced Heterodimeric Backbone 2 monomer 1 (-)

SEQ ID NO: 882 - protein, 216 aa, synthetic construct
  source 1..216: note = S239D : S239D - ADCC-enhanced Heterodimeric Backbone 2 monomer 2 (+)
APELLGGPDVFLFPPKPKDTLMISRTPEVTCVVVDVSHEDPEVKFNWYVDGVEVHNAKTKPREEQYNSTYRVVSVLTVLHQDWLNGKEYKCKVSNKALPAPIEKTISKAKGQPREPQVYTLPPSREQMTKNQVKLTCLVKGFYPSDIAVEWESNGQPENNYKTTPPVLDSDGSFFLYSKLTVDKSRWQQGNVFSCSVMHEALHNHYTQKSLSLSPG

SEQ ID NO: 883 - protein, 217 aa, synthetic construct; identical to SEQ ID NO: 819
  source 1..217: note = I332E : I332E - ADCC-enhanced Heterodimeric Backbone 3 monomer 1 (-)

SEQ ID NO: 884 - protein, 216 aa, synthetic construct
  source 1..216: note = I332E : I332E - ADCC-enhanced Heterodimeric Backbone 3 monomer 2 (+)
APELLGGPSVFLFPPKPKDTLMISRTPEVTCVVVDVSHEDPEVKFNWYVDGVEVHNAKTKPREEQYNSTYRVVSVLTVLHQDWLNGKEYKCKVSNKALPAPEEKTISKAKGQPREPQVYTLPPSREQMTKNQVKLTCLVKGFYPSDIAVEWESNGQPENNYKTTPPVLDSDGSFFLYSKLTVDKSRWQQGNVFSCSVMHEALHNHYTQKSLSLSPG

SEQ ID NO: 885 - protein, 217 aa, synthetic construct; identical to SEQ ID NO: 792
  source 1..217: note = WT : S239D/I332E - ADCC-enhanced Heterodimeric Backbone 4 monomer 1 (-)

SEQ ID NO: 886 - protein, 216 aa, synthetic construct; identical to SEQ ID NO: 880
  source 1..216: note = WT : S239D/I332E - ADCC-enhanced Heterodimeric Backbone 4 monomer 2 (+)

SEQ ID NO: 887 - protein, 217 aa, synthetic construct; identical to SEQ ID NO: 792
  source 1..217: note = WT : S239D - ADCC-enhanced Heterodimeric Backbone 5 monomer 1 (-)

SEQ ID NO: 888 - skipped

SEQ ID NO: 889 - protein, 216 aa, synthetic construct; identical to SEQ ID NO: 882
  source 1..216: note = WT : S239D - ADCC-enhanced Heterodimeric Backbone 5 monomer 2 (+)

SEQ ID NO: 890 - protein, 217 aa, synthetic construct; identical to SEQ ID NO: 792
  source 1..217: note = WT : I332E - ADCC-enhanced Heterodimeric Backbone 6 monomer 1 (-)

SEQ ID NO: 891 - protein, 216 aa, synthetic construct; identical to SEQ ID NO: 884
  source 1..216: note = WT : I332E - ADCC-enhanced Heterodimeric Backbone 6 monomer 2 (+)

SEQ ID NO: 892 - protein, 217 aa, synthetic construct; identical to SEQ ID NO: 815
  source 1..217: note = S239D/I332E : WT - ADCC-enhanced Heterodimeric Backbone 7 monomer 1 (-)

SEQ ID NO: 893 - protein, 216 aa, synthetic construct; identical to SEQ ID NO: 878
  source 1..216: note = S239D/I332E : WT - ADCC-enhanced Heterodimeric Backbone 7 monomer 2 (+)

SEQ ID NO: 894 - protein, 217 aa, synthetic construct; identical to SEQ ID NO: 817
  source 1..217: note = S239D : WT - ADCC-enhanced Heterodimeric Backbone 8 monomer 1 (-)

SEQ ID NO: 895 - protein, 216 aa, synthetic construct; identical to SEQ ID NO: 878
  source 1..216: note = S239D : WT - ADCC-enhanced Heterodimeric Backbone 8 monomer 2 (+)

SEQ ID NO: 896 - protein, 217 aa, synthetic construct; identical to SEQ ID NO: 819
  source 1..217: note = I332E : WT - ADCC-enhanced Heterodimeric Backbone 9 monomer 1 (-)

SEQ ID NO: 897 - protein, 216 aa, synthetic construct; identical to SEQ ID NO: 878
  source 1..216: note = I332E : WT - ADCC-enhanced Heterodimeric Backbone 9 monomer 2 (+)

SEQ ID NO: 898 - protein, 217 aa, synthetic construct; identical to SEQ ID NO: 815
  source 1..217: note = S239D/I332E : S239D - ADCC-enhanced Heterodimeric Backbone 10 monomer 1 (-)

SEQ ID NO: 899 - protein, 216 aa, synthetic construct; identical to SEQ ID NO: 882
  source 1..216: note = S239D/I332E : S239D - ADCC-enhanced Heterodimeric Backbone 10 monomer 2 (+)

SEQ ID NO: 900 - protein, 217 aa, synthetic construct; identical to SEQ ID NO: 815
  source 1..217: note = S239D/I332E : I332E - ADCC-enhanced Heterodimeric Backbone 11 monomer 1 (-)

SEQ ID NO: 901 - protein, 216 aa, synthetic construct; identical to SEQ ID NO: 884
  source 1..216: note = S239D/I332E : I332E - ADCC-enhanced Heterodimeric Backbone 11 monomer 2 (+)

SEQ ID NO: 902 - protein, 217 aa, synthetic construct; identical to SEQ ID NO: 817
  source 1..217: note = S239D : S239D/I332E - ADCC-enhanced Heterodimeric Backbone 12 monomer 1 (-)

SEQ ID NO: 903 - protein, 216 aa, synthetic construct; identical to SEQ ID NO: 880
  source 1..216: note = S239D : S239D/I332E - ADCC-enhanced Heterodimeric Backbone 12 monomer 2 (+)

SEQ ID NO: 904 - protein, 217 aa, synthetic construct; identical to SEQ ID NO: 819
  source 1..217: note = I332E : S239D/I332E - ADCC-enhanced Heterodimeric Backbone 13 monomer 1 (-)

SEQ ID NO: 905 - protein, 216 aa, synthetic construct; identical to SEQ ID NO: 880
  source 1..216: note = I332E : S239D/I332E - ADCC-enhanced Heterodimeric Backbone 13 monomer 2 (+)

SEQ ID NO: 906 - protein, 217 aa, synthetic construct; identical to SEQ ID NO: 817
  source 1..217: note = S239D : I332E - ADCC-enhanced Heterodimeric Backbone 14 monomer 1 (-)

SEQ ID NO: 907 - protein, 216 aa, synthetic construct; identical to SEQ ID NO: 884
  source 1..216: note = S239D : I332E - ADCC-enhanced Heterodimeric Backbone 14 monomer 2 (+)

SEQ ID NO: 908 - protein, 217 aa, synthetic construct; identical to SEQ ID NO: 819
  source 1..217: note = I332E : S239D - ADCC-enhanced Heterodimeric Backbone 15 monomer 1 (-)

SEQ ID NO: 909 - protein, 216 aa, synthetic construct; identical to SEQ ID NO: 882
  source 1..216: note = I332E : S239D - ADCC-enhanced Heterodimeric Backbone 15 monomer 2 (+)

SEQ ID NO: 910 - protein, 217 aa, synthetic construct; identical to SEQ ID NO: 845
  source 1..217: note = S239D/I332E : S239D/I332E - ADCC-enhanced Heterodimeric Backbone 1 w/ Xtend monomer 1 (-)

SEQ ID NO: 911 - protein, 216 aa, synthetic construct
  source 1..216: note = S239D/I332E : S239D/I332E - ADCC-enhanced Heterodimeric Backbone 1 w/ Xtend monomer 2 (+)
APELLGGPDVFLFPPKPKDTLMISRTPEVTCVVVDVSHEDPEVKFNWYVDGVEVHNAKTKPREEQYNSTYRVVSVLTVLHQDWLNGKEYKCKVSNKALPAPEEKTISKAKGQPREPQVYTLPPSREQMTKNQVKLTCLVKGFYPSDIAVEWESNGQPENNYKTTPPVLDSDGSFFLYSKLTVDKSRWQQGNVFSCSVLHEALHSHYTQKSLSLSPG

SEQ ID NO: 912 - protein, 217 aa, synthetic construct; identical to SEQ ID NO: 847
  source 1..217: note = S239D : S239D - ADCC-enhanced Heterodimeric Backbone 2 w/ Xtend monomer 1 (-)

SEQ ID NO: 913 - protein, 216 aa, synthetic construct
  source 1..216: note = S239D : S239D - ADCC-enhanced Heterodimeric Backbone 2 w/ Xtend monomer 2 (+)
APELLGGPDVFLFPPKPKDTLMISRTPEVTCVVVDVSHEDPEVKFNWYVDGVEVHNAKTKPREEQYNSTYRVVSVLTVLHQDWLNGKEYKCKVSNKALPAPIEKTISKAKGQPREPQVYTLPPSREQMTKNQVKLTCLVKGFYPSDIAVEWESNGQPENNYKTTPPVLDSDGSFFLYSKLTVDKSRWQQGNVFSCSVLHEALHSHYTQKSLSLSPG

SEQ ID NO: 914 - protein, 217 aa, synthetic construct; identical to SEQ ID NO: 849
  source 1..217: note = I332E : I332E - ADCC-enhanced Heterodimeric Backbone 3 w/ Xtend monomer 1 (-)

SEQ ID NO: 915 - protein, 216 aa, synthetic construct
  source 1..216: note = I332E : I332E - ADCC-enhanced Heterodimeric Backbone 3 w/ Xtend monomer 2 (+)
APELLGGPSVFLFPPKPKDTLMISRTPEVTCVVVDVSHEDPEVKFNWYVDGVEVHNAKTKPREEQYNSTYRVVSVLTVLHQDWLNGKEYKCKVSNKALPAPEEKTISKAKGQPREPQVYTLPPSREQMTKNQVKLTCLVKGFYPSDIAVEWESNGQPENNYKTTPPVLDSDGSFFLYSKLTVDKSRWQQGNVFSCSVLHEALHSHYTQKSLSLSPG

SEQ ID NO: 916 - protein, 217 aa, synthetic construct; identical to SEQ ID NO: 807
  source 1..217: note = WT : S239D/I332E - ADCC-enhanced Heterodimeric Backbone 4 w/ Xtend monomer 1 (-)

SEQ ID NO: 917 - protein, 216 aa, synthetic construct; identical to SEQ ID NO: 911
  source 1..216: note = WT : S239D/I332E - ADCC-enhanced Heterodimeric Backbone 4 w/ Xtend monomer 2 (+)

SEQ ID NO: 918 - protein, 217 aa, synthetic construct; identical to SEQ ID NO: 807
  source 1..217: note = WT : S239D - ADCC-enhanced Heterodimeric Backbone 5 w/ Xtend monomer 1 (-)

SEQ ID NO: 919 - protein, 216 aa, synthetic construct; identical to SEQ ID NO: 913
  source 1..216: note = WT : S239D - ADCC-enhanced Heterodimeric Backbone 5 w/ Xtend monomer 2 (+)

SEQ ID NO: 920 - protein, 217 aa, synthetic construct; identical to SEQ ID NO: 807
  source 1..217: note = WT : I332E - ADCC-enhanced Heterodimeric Backbone 6 w/ Xtend monomer 1 (-)

SEQ ID NO: 921 - protein, 216 aa, synthetic construct; identical to SEQ ID NO: 915
  source 1..216: note = WT : I332E - ADCC-enhanced Heterodimeric Backbone 6 w/ Xtend monomer 2 (+)

SEQ ID NO: 922 - protein, 217 aa, synthetic construct; identical to SEQ ID NO: 845
  source 1..217: note = S239D/I332E : WT - ADCC-enhanced Heterodimeric Backbone 7 w/ Xtend monomer 1 (-)

SEQ ID NO: 923 - protein, 216 aa, synthetic construct
  source 1..216: note = S239D/I332E : WT - ADCC-enhanced Heterodimeric Backbone 7 w/ Xtend monomer 2 (+)
APELLGGPSVFLFPPKPKDTLMISRTPEVTCVVVDVSHEDPEVKFNWYVDGVEVHNAKTKPREEQYNSTYRVVSVLTVLHQDWLNGKEYKCKVSNKALPAPIEKTISKAKGQPREPQVYTLPPSREQMTKNQVKLTCLVKGFYPSDIAVEWESNGQPENNYKTTPPVLDSDGSFFLYSKLTVDKSRWQQGNVFSCSVLHEALHSHYTQKSLSLSPG

SEQ ID NO: 924 - protein, 217 aa, synthetic construct; identical to SEQ ID NO: 847
  source 1..217: note = S239D : WT - ADCC-enhanced Heterodimeric Backbone 8 w/ Xtend monomer 1 (-)

SEQ ID NO: 925 - protein, 216 aa, synthetic construct; identical to SEQ ID NO: 923
  source 1..216: note = S239D : WT - ADCC-enhanced Heterodimeric Backbone 8 w/ Xtend monomer 2 (+)

SEQ ID NO: 926 - protein, 217 aa, synthetic construct; identical to SEQ ID NO: 849
  source 1..217: note = I332E : WT - ADCC-enhanced Heterodimeric Backbone 9 w/ Xtend monomer 1 (-)

SEQ ID NO: 927 - protein, 216 aa, synthetic construct; identical to SEQ ID NO: 923
  source 1..216: note = I332E : WT - ADCC-enhanced Heterodimeric Backbone 9 w/ Xtend monomer 2 (+)

SEQ ID NO: 928 - protein, 217 aa, synthetic construct; identical to SEQ ID NO: 845
  source 1..217: note = S239D/I332E : S239D - ADCC-enhanced Heterodimeric Backbone 10 w/ Xtend monomer 1 (-)

SEQ ID NO: 929 - protein, 216 aa, synthetic construct; identical to SEQ ID NO: 913
  source 1..216: note = S239D/I332E : S239D - ADCC-enhanced Heterodimeric Backbone 10 w/ Xtend monomer 2 (+)

SEQ ID NO: 930 - protein, 217 aa, synthetic construct; identical to SEQ ID NO: 845
  source 1..217: note = S239D/I332E : I332E - ADCC-enhanced Heterodimeric Backbone 11 w/ Xtend monomer 1 (-)

SEQ ID NO: 931 - protein, 216 aa, synthetic construct; identical to SEQ ID NO: 915
  source 1..216: note = S239D/I332E : I332E - ADCC-enhanced Heterodimeric Backbone 11 w/ Xtend monomer 2 (+)

SEQ ID NO: 932 - protein, 217 aa, synthetic construct; identical to SEQ ID NO: 847
  source 1..217: note = S239D : S239D/I332E - ADCC-enhanced Heterodimeric Backbone 12 w/ Xtend monomer 1 (-)

SEQ ID NO: 933 - protein, 216 aa, synthetic construct; identical to SEQ ID NO: 911
  source 1..216: note = S239D : S239D/I332E - ADCC-enhanced Heterodimeric Backbone 12 w/ Xtend monomer 2 (+)

SEQ ID NO: 934 - protein, 217 aa, synthetic construct; identical to SEQ ID NO: 849
  source 1..217: note = I332E : S239D/I332E - ADCC-enhanced Heterodimeric Backbone 13 w/ Xtend monomer 1 (-)

SEQ ID NO: 935 - protein, 216 aa, synthetic construct; identical to SEQ ID NO: 911
  source 1..216: note = I332E : S239D/I332E - ADCC-enhanced Heterodimeric Backbone 13 w/ Xtend monomer 2 (+)

SEQ ID NO: 936 - protein, 217 aa, synthetic construct; identical to SEQ ID NO: 847
  source 1..217: note = S239D : I332E - ADCC-enhanced Heterodimeric Backbone 14 w/ Xtend monomer 1 (-)

SEQ ID NO: 937 - protein, 216 aa, synthetic construct; identical to SEQ ID NO: 915
  source 1..216: note = S239D : I332E - ADCC-enhanced Heterodimeric Backbone 14 w/ Xtend monomer 2 (+)

SEQ ID NO: 938 - protein, 217 aa, synthetic construct; identical to SEQ ID NO: 849
  source 1..217: note = I332E : S239D - ADCC-enhanced Heterodimeric Backbone 15 w/ Xtend monomer 1 (-)

SEQ ID NO: 939 - protein, 216 aa, synthetic construct; identical to SEQ ID NO: 913
  source 1..216: note = I332E : S239D - ADCC-enhanced Heterodimeric Backbone 15 w/ Xtend monomer 2 (+)

SEQ ID NO: 940 - protein, 450 aa, synthetic construct
  source 1..450: note = XENP42069 Chain 1- 1D7B4[NKG2D]_H1.1_IgG1_PVA_/S267K
EVQLLESGGGLVQPGGSLRLSCAASGFTFSSIAMSWVRQAPGKGLEWVSSISASGGSTYYADSVKGRFTISRDNSKNTLYLQMNSLRAEDTAVYYCAKGIFSIYFFYFDYWGQGTLVTVSSASTKGPSVFPLAPSSKSTSGGTAALGCLVKDYFPEPVTVSWNSGALTSGVHTFPAVLQSSGLYSLSSVVTVPSSSLGTQTYICNVNHKPSNTKVDKKVEPKSCDKTHTCPPCPAPPVAGPSVFLFPPKPKDTLMISRTPEVTCVVVDVKHEDPEVKFNWYVDGVEVHNAKTKPREEQYNSTYRVVSVLTVLHQDWLNGKEYKCKVSNKALPAPIEKTISKAKGQPREPQVYTLPPSREEMTKNQVSLTCLVKGFYPSDIAVEWESNGQPENNYKTTPPVLDSDGSFFLYSKLTVDKSRWQQGNVFSCSVMHEALHNHYTQKSLSLSPGK

SEQ ID NO: 941 - protein, 450 aa, synthetic construct
  source 1..450: note = XENP42070 Chain 1- 1D7B4[NKG2D]_H1.2_IgG1_PVA_/S267K
EVQLLESGGGLVQPGGSLRLSCAASGFTFSSAAMSWVRQAPGKGLEWVSSISASGGSTYYADSVKGRFTISRDNSKNTLYLQMNSLRAEDTAVYYCAKGIFSIYFFYFDYWGQGTLVTVSSASTKGPSVFPLAPSSKSTSGGTAALGCLVKDYFPEPVTVSWNSGALTSGVHTFPAVLQSSGLYSLSSVVTVPSSSLGTQTYICNVNHKPSNTKVDKKVEPKSCDKTHTCPPCPAPPVAGPSVFLFPPKPKDTLMISRTPEVTCVVVDVKHEDPEVKFNWYVDGVEVHNAKTKPREEQYNSTYRVVSVLTVLHQDWLNGKEYKCKVSNKALPAPIEKTISKAKGQPREPQVYTLPPSREEMTKNQVSLTCLVKGFYPSDIAVEWESNGQPENNYKTTPPVLDSDGSFFLYSKLTVDKSRWQQGNVFSCSVMHEALHNHYTQKSLSLSPGK

SEQ ID NO: 942 - protein, 450 aa, synthetic construct
  source 1..450: note = XENP42071 Chain 1- 1D7B4[NKG2D]_H1.3_IgG1_PVA_/S267K
EVQLLESGGGLVQPGGSLRLSCAASGFTFSSSAMSWVRQAPGKGLEWVSSISASGGSTYYADSVKGRFTISRDNSKNTLYLQMNSLRAEDTAVYYCAKGIFSIYFFYFDYWGQGTLVTVSSASTKGPSVFPLAPSSKSTSGGTAALGCLVKDYFPEPVTVSWNSGALTSGVHTFPAVLQSSGLYSLSSVVTVPSSSLGTQTYICNVNHKPSNTKVDKKVEPKSCDKTHTCPPCPAPPVAGPSVFLFPPKPKDTLMISRTPEVTCVVVDVKHEDPEVKFNWYVDGVEVHNAKTKPREEQYNSTYRVVSVLTVLHQDWLNGKEYKCKVSNKALPAPIEKTISKAKGQPREPQVYTLPPSREEMTKNQVSLTCLVKGFYPSDIAVEWESNGQPENNYKTTPPVLDSDGSFFLYSKLTVDKSRWQQGNVFSCSVMHEALHNHYTQKSLSLSPGK

SEQ ID NO: 943 - protein, 450 aa, synthetic construct
  source 1..450: note = XENP42072 Chain 1- 1D7B4[NKG2D]_H1.4_L1_IgG1_PVA_/S267K
EVQLLESGGGLVQPGGSLRLSCAASGFTFSSEAMSWVRQAPGKGLEWVSSISASGGSTYYADSVKGRFTISRDNSKNTLYLQMNSLRAEDTAVYYCAKGIFSIYFFYFDYWGQGTLVTVSSASTKGPSVFPLAPSSKSTSGGTAALGCLVKDYFPEPVTVSWNSGALTSGVHTFPAVLQSSGLYSLSSVVTVPSSSLGTQTYICNVNHKPSNTKVDKKVEPKSCDKTHTCPPCPAPPVAGPSVFLFPPKPKDTLMISRTPEVTCVVVDVKHEDPEVKFNWYVDGVEVHNAKTKPREEQYNSTYRVVSVLTVLHQDWLNGKEYKCKVSNKALPAPIEKTISKAKGQPREPQVYTLPPSREEMTKNQVSLTCLVKGFYPSDIAVEWESNGQPENNYKTTPPVLDSDGSFFLYSKLTVDKSRWQQGNVFSCSVMHEALHNHYTQKSLSLSPGK

SEQ ID NO: 944 - protein, 450 aa, synthetic construct
  source 1..450: note = XENP42073 Chain 1- 1D7B4[NKG2D]_H1.5_IgG1_PVA_/S267K
EVQLLESGGGLVQPGGSLRLSCAASGFTFSSHAMSWVRQAPGKGLEWVSSISASGGSTYYADSVKGRFTISRDNSKNTLYLQMNSLRAEDTAVYYCAKGIFSIYFFYFDYWGQGTLVTVSSASTKGPSVFPLAPSSKSTSGGTAALGCLVKDYFPEPVTVSWNSGALTSGVHTFPAVLQSSGLYSLSSVVTVPSSSLGTQTYICNVNHKPSNTKVDKKVEPKSCDKTHTCPPCPAPPVAGPSVFLFPPKPKDTLMISRTPEVTCVVVDVKHEDPEVKFNWYVDGVEVHNAKTKPREEQYNSTYRVVSVLTVLHQDWLNGKEYKCKVSNKALPAPIEKTISKAKGQPREPQVYTLPPSREEMTKNQVSLTCLVKGFYPSDIAVEWESNGQPENNYKTTPPVLDSDGSFFLYSKLTVDKSRWQQGNVFSCSVMHEALHNHYTQKSLSLSPGK

SEQ ID NO: 945 - protein, 450 aa, synthetic construct
  source 1..450: note = XENP42074 Chain 1- 1D7B4[NKG2D]_H1.6_IgG1_PVA_/S267K
EVQLLESGGGLVQPGGSLRLSCAASGFTFSSQAMSWVRQAPGKGLEWVSSISASGGSTYYADSVKGRFTISRDNSKNTLYLQMNSLRAEDTAVYYCAKGIFSIYFFYFDYWGQGTLVTVSSASTKGPSVFPLAPSSKSTSGGTAALGCLVKDYFPEPVTVSWNSGALTSGVHTFPAVLQSSGLYSLSSVVTVPSSSLGTQTYICNVNHKPSNTKVDKKVEPKSCDKTHTCPPCPAPPVAGPSVFLFPPKPKDTLMISRTPEVTCVVVDVKHEDPEVKFNWYVDGVEVHNAKTKPREEQYNSTYRVVSVLTVLHQDWLNGKEYKCKVSNKALPAPIEKTISKAKGQPREPQVYTLPPSREEMTKNQVSLTCLVKGFYPSDIAVEWESNGQPENNYKTTPPVLDSDGSFFLYSKLTVDKSRWQQGNVFSCSVMHEALHNHYTQKSLSLSPGK

SEQ ID NO: 946 - protein, 450 aa, synthetic construct
  source 1..450: note = XENP42075 Chain 1- 1D7B4[NKG2D]_H1.7_IgG1_PVA_/S267K
EVQLLESGGGLVQPGGSLRLSCAASGFTFSSYFMSWVRQAPGKGLEWVSSISASGGSTYYADSVKGRFTISRDNSKNTLYLQMNSLRAEDTAVYYCAKGIFSIYFFYFDYWGQGTLVTVSSASTKGPSVFPLAPSSKSTSGGTAALGCLVKDYFPEPVTVSWNSGALTSGVHTFPAVLQSSGLYSLSSVVTVPSSSLGTQTYICNVNHKPSNTKVDKKVEPKSCDKTHTCPPCPAPPVAGPSVFLFPPKPKDTLMISRTPEVTCVVVDVKHEDPEVKFNWYVDGVEVHNAKTKPREEQYNSTYRVVSVLTVLHQDWLNGKEYKCKVSNKALPAPIEKTISKAKGQPREPQVYTLPPSREEMTKNQVSLTCLVKGFYPSDIAVEWESNGQPENNYKTTPPVLDSDGSFFLYSKLTVDKSRWQQGNVFSCSVMHEALHNHYTQKSLSLSPGK

SEQ ID NO: 947 - protein, 450 aa, synthetic construct
  source 1..450: note = XENP42076 Chain 1- 1D7B4[NKG2D]_H1.8_IgG1_PVA_/S267K
EVQLLESGGGLVQPGGSLRLSCAASGFTFSSYHMSWVRQAPGKGLEWVSSISASGGSTYYADSVKGRFTISRDNSKNTLYLQMNSLRAEDTAVYYCAKGIFSIYFFYFDYWGQGTLVTVSSASTKGPSVFPLAPSSKSTSGGTAALGCLVKDYFPEPVTVSWNSGALTSGVHTFPAVLQSSGLYSLSSVVTVPSSSLGTQTYICNVNHKPSNTKVDKKVEPKSCDKTHTCPPCPAPPVAGPSVFLFPPKPKDTLMISRTPEVTCVVVDVKHEDPEVKFNWYVDGVEVHNAKTKPREEQYNSTYRVVSVLTVLHQDWLNGKEYKCKVSNKALPAPIEKTISKAKGQPREPQVYTLPPSREEMTKNQVSLTCLVKGFYPSDIAVEWESNGQPENNYKTTPPVLDSDGSFFLYSKLTVDKSRWQQGNVFSCSVMHEALHNHYTQKSLSLSPGK

SEQ ID NO: 948 - protein, 450 aa, synthetic construct
  source 1..450: note = XENP42077 Chain 1- 1D7B4[NKG2D]_H1.9_IgG1_PVA_/S267K
EVQLLESGGGLVQPGGSLRLSCAASGFTFSSYAMSWVRQAPGKGLEWVSSISASGGSTYYADSVKGRFTISRDNSKNTLYLQMNSLRAEDTAVYYCAKGWFSIYFFYFDYWGQGTLVTVSSASTKGPSVFPLAPSSKSTSGGTAALGCLVKDYFPEPVTVSWNSGALTSGVHTFPAVLQSSGLYSLSSVVTVPSSSLGTQTYICNVNHKPSNTKVDKKVEPKSCDKTHTCPPCPAPPVAGPSVFLFPPKPKDTLMISRTPEVTCVVVDVKHEDPEVKFNWYVDGVEVHNAKTKPREEQYNSTYRVVSVLTVLHQDWLNGKEYKCKVSNKALPAPIEKTISKAKGQPREPQVYTLPPSREEMTKNQVSLTCLVKGFYPSDIAVEWESNGQPENNYKTTPPVLDSDGSFFLYSKLTVDKSRWQQGNVFSCSVMHEALHNHYTQKSLSLSPGK

SEQ ID NO: 949 - protein, 450 aa, synthetic construct
  source 1..450: note = XENP42078 Chain 1- 1D7B4[NKG2D]_H1.10_IgG1_PVA_/S267K
EVQLLESGGGLVQPGGSLRLSCAASGFTFSSYAMSWVRQAPGKGLEWVSSISASGGSTYYADSVKGRFTISRDNSKNTLYLQMNSLRAEDTAVYYCAKGEFSIYFFYFDYWGQGTLVTVSSASTKGPSVFPLAPSSKSTSGGTAALGCLVKDYFPEPVTVSWNSGALTSGVHTFPAVLQSSGLYSLSSVVTVPSSSLGTQTYICNVNHKPSNTKVDKKVEPKSCDKTHTCPPCPAPPVAGPSVFLFPPKPKDTLMISRTPEVTCVVVDVKHEDPEVKFNWYVDGVEVHNAKTKPREEQYNSTYRVVSVLTVLHQDWLNGKEYKCKVSNKALPAPIEKTISKAKGQPREPQVYTLPPSREEMTKNQVSLTCLVKGFYPSDIAVEWESNGQPENNYKTTPPVLDSDGSFFLYSKLTVDKSRWQQGNVFSCSVMHEALHNHYTQKSLSLSPGK

SEQ ID NO: 950 - protein, 450 aa, synthetic construct
  source 1..450: note = XENP42079 Chain 1- 1D7B4[NKG2D]_H1.11_IgG1_PVA_/S267K
EVQLLESGGGLVQPGGSLRLSCAASGFTFSSYAMSWVRQAPGKGLEWVSSISASGGSTYYADSVKGRFTISRDNSKNTLYLQMNSLRAEDTAVYYCAKGKFSIYFFYFDYWGQGTLVTVSSASTKGPSVFPLAPSSKSTSGGTAALGCLVKDYFPEPVTVSWNSGALTSGVHTFPAVLQSSGLYSLSSVVTVPSSSLGTQTYICNVNHKPSNTKVDKKVEPKSCDKTHTCPPCPAPPVAGPSVFLFPPKPKDTLMISRTPEVTCVVVDVKHEDPEVKFNWYVDGVEVHNAKTKPREEQYNSTYRVVSVLTVLHQDWLNGKEYKCKVSNKALPAPIEKTISKAKGQPREPQVYTLPPSREEMTKNQVSLTCLVKGFYPSDIAVEWESNGQPENNYKTTPPVLDSDGSFFLYSKLTVDKSRWQQGNVFSCSVMHEALHNHYTQKSLSLSPGK

SEQ ID NO: 951 - protein, 450 aa, synthetic construct
  source 1..450: note = XENP42080 Chain 1- 1D7B4[NKG2D]_H1.12_IgG1_PVA_/S267K
EVQLLESGGGLVQPGGSLRLSCAASGFTFSSYAMSWVRQAPGKGLEWVSSISASGGSTYYADSVKGRFTISRDNSKNTLYLQMNSLRAEDTAVYYCAKGAFSIYFFYFDYWGQGTLVTVSSASTKGPSVFPLAPSSKSTSGGTAALGCLVKDYFPEPVTVSWNSGALTSGVHTFPAVLQSSGLYSLSSVVTVPSSSLGTQTYICNVNHKPSNTKVDKKVEPKSCDKTHTCPPCPAPPVAGPSVFLFPPKPKDTLMISRTPEVTCVVVDVKHEDPEVKFNWYVDGVEVHNAKTKPREEQYNSTYRVVSVLTVLHQDWLNGKEYKCKVSNKALPAPIEKTISKAKGQPREPQVYTLPPSREEMTKNQVSLTCLVKGFYPSDIAVEWESNGQPENNYKTTPPVLDSDGSFFLYSKLTVDKSRWQQGNVFSCSVMHEALHNHYTQKSLSLSPGK

SEQ ID NO: 952 - protein, 450 aa, synthetic construct
  source 1..450: note = XENP42081 Chain 1- 1D7B4[NKG2D]_H1.13_IgG1_PVA_/S267K
EVQLLESGGGLVQPGGSLRLSCAASGFTFSSYAMSWVRQAPGKGLEWVSSISASGGSTYYADSVKGRFTISRDNSKNTLYLQMNSLRAEDTAVYYCAKGHFSIYFFYFDYWGQGTLVTVSSASTKGPSVFPLAPSSKSTSGGTAALGCLVKDYFPEPVTVSWNSGALTSGVHTFPAVLQSSGLYSLSSVVTVPSSSLGTQTYICNVNHKPSNTKVDKKVEPKSCDKTHTCPPCPAPPVAGPSVFLFPPKPKDTLMISRTPEVTCVVVDVKHEDPEVKFNWYVDGVEVHNAKTKPREEQYNSTYRVVSVLTVLHQDWLNGKEYKCKVSNKALPAPIEKTISKAKGQPREPQVYTLPPSREEMTKNQVSLTCLVKGFYPSDIAVEWESNGQPENNYKTTPPVLDSDGSFFLYSKLTVDKSRWQQGNVFSCSVMHEALHNHYTQKSLSLSPGK

SEQ ID NO: 953 - protein, 450 aa, synthetic construct
  source 1..450: note = XENP42082 Chain 1- 1D7B4[NKG2D]_H1.14_IgG1_PVA_/S267K
EVQLLESGGGLVQPGGSLRLSCAASGFTFSSYAMSWVRQAPGKGLEWVSSISASGGSTYYADSVKGRFTISRDNSKNTLYLQMNSLRAEDTAVYYCAKGIESIYFFYFDYWGQGTLVTVSSASTKGPSVFPLAPSSKSTSGGTAALGCLVKDYFPEPVTVSWNSGALTSGVHTFPAVLQSSGLYSLSSVVTVPSSSLGTQTYICNVNHKPSNTKVDKKVEPKSCDKTHTCPPCPAPPVAGPSVFLFPPKPKDTLMISRTPEVTCVVVDVKHEDPEVKFNWYVDGVEVHNAKTKPREEQYNSTYRVVSVLTVLHQDWLNGKEYKCKVSNKALPAPIEKTISKAKGQPREPQVYTLPPSREEMTKNQVSLTCLVKGFYPSDIAVEWESNGQPENNYKTTPPVLDSDGSFFLYSKLTVDKSRWQQGNVFSCSVMHEALHNHYTQKSLSLSPGK

SEQ ID NO: 954 - protein, 450 aa, synthetic construct
  source 1..450: note = XENP42083 Chain 1- 1D7B4[NKG2D]_H1.15_IgG1_PVA_/S267K
EVQLLESGGGLVQPGGSLRLSCAASGFTFSSYAMSWVRQAPGKGLEWVSSISASGGSTYYADSVKGRFTISRDNSKNTLYLQMNSLRAEDTAVYYCAKGIASIYFFYFDYWGQGTLVTVSSASTKGPSVFPLAPSSKSTSGGTAALGCLVKDYFPEPVTVSWNSGALTSGVHTFPAVLQSSGLYSLSSVVTVPSSSLGTQTYICNVNHKPSNTKVDKKVEPKSCDKTHTCPPCPAPPVAGPSVFLFPPKPKDTLMISRTPEVTCVVVDVKHEDPEVKFNWYVDGVEVHNAKTKPREEQYNSTYRVVSVLTVLHQDWLNGKEYKCKVSNKALPAPIEKTISKAKGQPREPQVYTLPPSREEMTKNQVSLTCLVKGFYPSDIAVEWESNGQPENNYKTTPPVLDSDGSFFLYSKLTVDKSRWQQGNVFSCSVMHEALHNHYTQKSLSLSPGK

SEQ ID NO: 955 - protein, 450 aa, synthetic construct
  source 1..450: note = XENP42084 Chain 1- 1D7B4[NKG2D]_H1.16_IgG1_PVA_/S267K
EVQLLESGGGLVQPGGSLRLSCAASGFTFSSYAMSWVRQAPGKGLEWVSSISASGGSTYYADSVKGRFTISRDNSKNTLYLQMNSLRAEDTAVYYCAKGIWSIYFFYFDYWGQGTLVTVSSASTKGPSVFPLAPSSKSTSGGTAALGCLVKDYFPEPVTVSWNSGALTSGVHTFPAVLQSSGLYSLSSVVTVPSSSLGTQTYICNVNHKPSNTKVDKKVEPKSCDKTHTCPPCPAPPVAGPSVFLFPPKPKDTLMISRTPEVTCVVVDVKHEDPEVKFNWYVDGVEVHNAKTKPREEQYNSTYRVVSVLTVLHQDWLNGKEYKCKVSNKALPAPIEKTISKAKGQPREPQVYTLPPSREEMTKNQVSLTCLVKGFYPSDIAVEWESNGQPENNYKTTPPVLDSDGSFFLYSKLTVDKSRWQQGNVFSCSVMHEALHNHYTQKSLSLSPGK

SEQ ID NO: 956 - protein, 450 aa, synthetic construct
  source 1..450: note = XENP42085 Chain 1- 1D7B4[NKG2D]_H1.17_IgG1_PVA_/S267K
EVQLLESGGGLVQPGGSLRLSCAASGFTFSSYAMSWVRQAPGKGLEWVSSISASGGSTYYADSVKGRFTISRDNSKNTLYLQMNSLRAEDTAVYYCAKGIQSIYFFYFDYWGQGTLVTVSSASTKGPSVFPLAPSSKSTSGGTAALGCLVKDYFPEPVTVSWNSGALTSGVHTFPAVLQSSGLYSLSSVVTVPSSSLGTQTYICNVNHKPSNTKVDKKVEPKSCDKTHTCPPCPAPPVAGPSVFLFPPKPKDTLMISRTPEVTCVVVDVKHEDPEVKFNWYVDGVEVHNAKTKPREEQYNSTYRVVSVLTVLHQDWLNGKEYKCKVSNKALPAPIEKTISKAKGQPREPQVYTLPPSREEMTKNQVSLTCLVKGFYPSDIAVEWESNGQPENNYKTTPPVLDSDGSFFLYSKLTVDKSRWQQGNVFSCSVMHEALHNHYTQKSLSLSPGK

SEQ ID NO: 957 - protein, 450 aa, synthetic construct
  source 1..450: note = XENP42086 Chain 1- 1D7B4[NKG2D]_H1.18_IgG1_PVA_/S267K
EVQLLESGGGLVQPGGSLRLSCAASGFTFSSYAMSWVRQAPGKGLEWVSSISASGGSTYYADSVKGRFTISRDNSKNTLYLQMNSLRAEDTAVYYCAKGISSIYFFYFDYWGQGTLVTVSSASTKGPSVFPLAPSSKSTSGGTAALGCLVKDYFPEPVTVSWNSGALTSGVHTFPAVLQSSGLYSLSSVVTVPSSSLGTQTYICNVNHKPSNTKVDKKVEPKSCDKTHTCPPCPAPPVAGPSVFLFPPKPKDTLMISRTPEVTCVVVDVKHEDPEVKFNWYVDGVEVHNAKTKPREEQYNSTYRVVSVLTVLHQDWLNGKEYKCKVSNKALPAPIEKTISKAKGQPREPQVYTLPPSREEMTKNQVSLTCLVKGFYPSDIAVEWESNGQPENNYKTTPPVLDSDGSFFLYSKLTVDKSRWQQGNVFSCSVMHEALHNHYTQKSLSLSPGK

SEQ ID NO: 958 - protein, 450 aa, synthetic construct
  source 1..450: note = XENP42087 Chain 1- 1D7B4[NKG2D]_H1.19_IgG1_PVA_/S267K
EVQLLESGGGLVQPGGSLRLSCAASGFTFSSYAMSWVRQAPGKGLEWVSSISASGGSTYYADSVKGRFTISRDNSKNTLYLQMNSLRAEDTAVYYCAKGIHSIYFFYFDYWGQGTLVTVSSASTKGPSVFPLAPSSKSTSGGTAALGCLVKDYFPEPVTVSWNSGALTSGVHTFPAVLQSSGLYSLSSVVTVPSSSLGTQTYICNVNHKPSNTKVDKKVEPKSCDKTHTCPPCPAPPVAGPSVFLFPPKPKDTLMISRTPEVTCVVVDVKHEDPEVKFNWYVDGVEVHNAKTKPREEQYNSTYRVVSVLTVLHQDWLNGKEYKCKVSNKALPAPIEKTISKAKGQPREPQVYTLPPSREEMTKNQVSLTCLVKGFYPSDIAVEWESNGQPENNYKTTPPVLDSDGSFFLYSKLTVDKSRWQQGNVFSCSVMHEALHNHYTQKSLSLSPGK

SEQ ID NO: 959 - protein, 450 aa, synthetic construct
  source 1..450: note = XENP42088 Chain 1- 1D7B4[NKG2D]_H1.20_IgG1_PVA_/S267K
EVQLLESGGGLVQPGGSLRLSCAASGFTFSSYAMSWVRQAPGKGLEWVSSISASGGSTYYADSVKGRFTISRDNSKNTLYLQMNSLRAEDTAVYYCAKGIISIYFFYFDYWGQGTLVTVSSASTKGPSVFPLAPSSKSTSGGTAALGCLVKDYFPEPVTVSWNSGALTSGVHTFPAVLQSSGLYSLSSVVTVPSSSLGTQTYICNVNHKPSNTKVDKKVEPKSCDKTHTCPPCPAPPVAGPSVFLFPPKPKDTLMISRTPEVTCVVVDVKHEDPEVKFNWYVDGVEVHNAKTKPREEQYNSTYRVVSVLTVLHQDWLNGKEYKCKVSNKALPAPIEKTISKAKGQPREPQVYTLPPSREEMTKNQVSLTCLVKGFYPSDIAVEWESNGQPENNYKTTPPVLDSDGSFFLYSKLTVDKSRWQQGNVFSCSVMHEALHNHYTQKSLSLSPGK

SEQ ID NO: 960 - protein, 450 aa, synthetic construct
  source 1..450: note = XENP42089 Chain 1- 1D7B4[NKG2D]_H1.21_IgG1_PVA_/S267K
EVQLLESGGGLVQPGGSLRLSCAASGFTFSSYAMSWVRQAPGKGLEWVSSISASGGSTYYADSVKGRFTISRDNSKNTLYLQMNSLRAEDTAVYYCAKGIFYIYFFYFDYWGQGTLVTVSSASTKGPSVFPLAPSSKSTSGGTAALGCLVKDYFPEPVTVSWNSGALTSGVHTFPAVLQSSGLYSLSSVVTVPSSSLGTQTYICNVNHKPSNTKVDKKVEPKSCDKTHTCPPCPAPPVAGPSVFLFPPKPKDTLMISRTPEVTCVVVDVKHEDPEVKFNWYVDGVEVHNAKTKPREEQYNSTYRVVSVLTVLHQDWLNGKEYKCKVSNKALPAPIEKTISKAKGQPREPQVYTLPPSREEMTKNQVSLTCLVKGFYPSDIAVEWESNGQPENNYKTTPPVLDSDGSFFLYSKLTVDKSRWQQGNVFSCSVMHEALHNHYTQKSLSLSPGK

SEQ ID NO: 961 - protein, 450 aa, synthetic construct
  source 1..450: note = XENP42090 Chain 1- 1D7B4[NKG2D]_H1.22_IgG1_PVA_/S267K
EVQLLESGGGLVQPGGSLRLSCAASGFTFSSYAMSWVRQAPGKGLEWVSSISASGGSTYYADSVKGRFTISRDNSKNTLYLQMNSLRAEDTAVYYCAKGIFEIYFFYFDYWGQGTLVTVSSASTKGPSVFPLAPSSKSTSGGTAALGCLVKDYFPEPVTVSWNSGALTSGVHTFPAVLQSSGLYSLSSVVTVPSSSLGTQTYICNVNHKPSNTKVDKKVEPKSCDKTHTCPPCPAPPVAGPSVFLFPPKPKDTLMISRTPEVTCVVVDVKHEDPEVKFNWYVDGVEVHNAKTKPREEQYNSTYRVVSVLTVLHQDWLNGKEYKCKVSNKALPAPIEKTISKAKGQPREPQVYTLPPSREEMTKNQVSLTCLVKGFYPSDIAVEWESNGQPENNYKTTPPVLDSDGSFFLYSKLTVDKSRWQQGNVFSCSVMHEALHNHYTQKSLSLSPGK

SEQ ID NO: 962 - protein, 450 aa, synthetic construct
  source 1..450: note = XENP42091 Chain 1- 1D7B4[NKG2D]_H1.23_IgG1_PVA_/S267K
EVQLLESGGGLVQPGGSLRLSCAASGFTFSSYAMSWVRQAPGKGLEWVSSISASGGSTYYADSVKGRFTISRDNSKNTLYLQMNSLRAEDTAVYYCAKGIFAIYFFYFDYWGQGTLVTVSSASTKGPSVFPLAPSSKSTSGGTAALGCLVKDYFPEPVTVSWNSGALTSGVHTFPAVLQSSGLYSLSSVVTVPSSSLGTQTYICNVNHKPSNTKVDKKVEPKSCDKTHTCPPCPAPPVAGPSVFLFPPKPKDTLMISRTPEVTCVVVDVKHEDPEVKFNWYVDGVEVHNAKTKPREEQYNSTYRVVSVLTVLHQDWLNGKEYKCKVSNKALPAPIEKTISKAKGQPREPQVYTLPPSREEMTKNQVSLTCLVKGFYPSDIAVEWESNGQPENNYKTTPPVLDSDGSFFLYSKLTVDKSRWQQGNVFSCSVMHEALHNHYTQKSLSLSPGK

SEQ ID NO: 963 - protein, 450 aa, synthetic construct
  source 1..450: note = XENP42092 Chain 1- 1D7B4[NKG2D]_H1.24_IgG1_PVA_/S267K
EVQLLESGGGLVQPGGSLRLSCAASGFTFSSYAMSWVRQAPGKGLEWVSSISASGGSTYYADSVKGRFTISRDNSKNTLYLQMNSLRAEDTAVYYCAKGIFSWYFFYFDYWGQGTLVTVSSASTKGPSVFPLAPSSKSTSGGTAALGCLVKDYFPEPVTVSWNSGALTSGVHTFPAVLQSSGLYSLSSVVTVPSSSLGTQTYICNVNHKPSNTKVDKKVEPKSCDKTHTCPPCPAPPVAGPSVFLFPPKPKDTLMISRTPEVTCVVVDVKHEDPEVKFNWYVDGVEVHNAKTKPREEQYNSTYRVVSVLTVLHQDWLNGKEYKCKVSNKALPAPIEKTISKAKGQPREPQVYTLPPSREEMTKNQVSLTCLVKGFYPSDIAVEWESNGQPENNYKTTPPVLDSDGSFFLYSKLTVDKSRWQQGNVFSCSVMHEALHNHYTQKSLSLSPGK

SEQ ID NO: 964 - protein, 450 aa, synthetic construct
  source 1..450: note = XENP42093 Chain 1- 1D7B4[NKG2D]_H1.25_IgG1_PVA_/S267K
EVQLLESGGGLVQPGGSLRLSCAASGFTFSSYAMSWVRQAPGKGLEWVSSISASGGSTYYADSVKGRFTISRDNSKNTLYLQMNSLRAEDTAVYYCAKGIFSAYFFYFDYWGQGTLVTVSSASTKGPSVFPLAPSSKSTSGGTAALGCLVKDYFPEPVTVSWNSGALTSGVHTFPAVLQSSGLYSLSSVVTVPSSSLGTQTYICNVNHKPSNTKVDKKVEPKSCDKTHTCPPCPAPPVAGPSVFLFPPKPKDTLMISRTPEVTCVVVDVKHEDPEVKFNWYVDGVEVHNAKTKPREEQYNSTYRVVSVLTVLHQDWLNGKEYKCKVSNKALPAPIEKTISKAKGQPREPQVYTLPPSREEMTKNQVSLTCLVKGFYPSDIAVEWESNGQPENNYKTTPPVLDSDGSFFLYSKLTVDKSRWQQGNVFSCSVMHEALHNHYTQKSLSLSPGK

SEQ ID NO: 965 - protein, 450 aa, synthetic construct
  source 1..450: note = XENP42094 Chain 1- 1D7B4[NKG2D]_H1.26_IgG1_PVA_/S267K
EVQLLESGGGLVQPGGSLRLSCAASGFTFSSYAMSWVRQAPGKGLEWVSSISASGGSTYYADSVKGRFTISRDNSKNTLYLQMNSLRAEDTAVYYCAKGIFSQYFFYFDYWGQGTLVTVSSASTKGPSVFPLAPSSKSTSGGTAALGCLVKDYFPEPVTVSWNSGALTSGVHTFPAVLQSSGLYSLSSVVTVPSSSLGTQTYICNVNHKPSNTKVDKKVEPKSCDKTHTCPPCPAPPVAGPSVFLFPPKPKDTLMISRTPEVTCVVVDVKHEDPEVKFNWYVDGVEVHNAKTKPREEQYNSTYRVVSVLTVLHQDWLNGKEYKCKVSNKALPAPIEKTISKAKGQPREPQVYTLPPSREEMTKNQVSLTCLVKGFYPSDIAVEWESNGQPENNYKTTPPVLDSDGSFFLYSKLTVDKSRWQQGNVFSCSVMHEALHNHYTQKSLSLSPGK

SEQ ID NO: 966 - protein, 450 aa, synthetic construct
  source 1..450: note = XENP42095 Chain 1- 1D7B4[NKG2D]_H1.27_IgG1_PVA_/S267K
EVQLLESGGGLVQPGGSLRLSCAASGFTFSSYAMSWVRQAPGKGLEWVSSISASGGSTYYADSVKGRFTISRDNSKNTLYLQMNSLRAEDTAVYYCAKGIFSEYFFYFDYWGQGTLVTVSSASTKGPSVFPLAPSSKSTSGGTAALGCLVKDYFPEPVTVSWNSGALTSGVHTFPAVLQSSGLYSLSSVVTVPSSSLGTQTYICNVNHKPSNTKVDKKVEPKSCDKTHTCPPCPAPPVAGPSVFLFPPKPKDTLMISRTPEVTCVVVDVKHEDPEVKFNWYVDGVEVHNAKTKPREEQYNSTYRVVSVLTVLHQDWLNGKEYKCKVSNKALPAPIEKTISKAKGQPREPQVYTLPPSREEMTKNQVSLTCLVKGFYPSDIAVEWESNGQPENNYKTTPPVLDSDGSFFLYSKLTVDKSRWQQGNVFSCSVMHEALHNHYTQKSLSLSPGK

SEQ ID NO: 967 - protein, 450 aa, synthetic construct
  source 1..450: note = XENP42096 Chain 1- 1D7B4[NKG2D]_H1.28_IgG1_PVA_/S267K
EVQLLESGGGLVQPGGSLRLSCAASGFTFSSYAMSWVRQAPGKGLEWVSSISASGGSTYYADSVKGRFTISRDNSKNTLYLQMNSLRAEDTAVYYCAKGIFSHYFFYFDYWGQGTLVTVSSASTKGPSVFPLAPSSKSTSGGTAALGCLVKDYFPEPVTVSWNSGALTSGVHTFPAVLQSSGLYSLSSVVTVPSSSLGTQTYICNVNHKPSNTKVDKKVEPKSCDKTHTCPPCPAPPVAGPSVFLFPPKPKDTLMISRTPEVTCVVVDVKHEDPEVKFNWYVDGVEVHNAKTKPREEQYNSTYRVVSVLTVLHQDWLNGKEYKCKVSNKALPAPIEKTISKAKGQPREPQVYTLPPSREEMTKNQVSLTCLVKGFYPSDIAVEWESNGQPENNYKTTPPVLDSDGSFFLYSKLTVDKSRWQQGNVFSCSVMHEALHNHYTQKSLSLSPGK

SEQ ID NO: 968 - protein, 450 aa, synthetic construct
  source 1..450: note = XENP42097 Chain 1- 1D7B4[NKG2D]_H1.29_IgG1_PVA_/S267K
EVQLLESGGGLVQPGGSLRLSCAASGFTFSSYAMSWVRQAPGKGLEWVSSISASGGSTYYADSVKGRFTISRDNSKNTLYLQMNSLRAEDTAVYYCAKGIFSSYFFYFDYWGQGTLVTVSSASTKGPSVFPLAPSSKSTSGGTAALGCLVKDYFPEPVTVSWNSGALTSGVHTFPAVLQSSGLYSLSSVVTVPSSSLGTQTYICNVNHKPSNTKVDKKVEPKSCDKTHTCPPCPAPPVAGPSVFLFPPKPKDTLMISRTPEVTCVVVDVKHEDPEVKFNWYVDGVEVHNAKTKPREEQYNSTYRVVSVLTVLHQDWLNGKEYKCKVSNKALPAPIEKTISKAKGQPREPQVYTLPPSREEMTKNQVSLTCLVKGFYPSDIAVEWESNGQPENNYKTTPPVLDSDGSFFLYSKLTVDKSRWQQGNVFSCSVMHEALHNHYTQKSLSLSPGK

SEQ ID NO: 969 - protein, 450 aa, synthetic construct
  source 1..450: note = XENP42098 Chain 1- 1D7B4[NKG2D]_H1.30_IgG1_PVA_/S267K
EVQLLESGGGLVQPGGSLRLSCAASGFTFSSYAMSWVRQAPGKGLEWVSSISASGGSTYYADSVKGRFTISRDNSKNTLYLQMNSLRAEDTAVYYCAKGIFSIHFFYFDYWGQGTLVTVSSASTKGPSVFPLAPSSKSTSGGTAALGCLVKDYFPEPVTVSWNSGALTSGVHTFPAVLQSSGLYSLSSVVTVPSSSLGTQTYICNVNHKPSNTKVDKKVEPKSCDKTHTCPPCPAPPVAGPSVFLFPPKPKDTLMISRTPEVTCVVVDVKHEDPEVKFNWYVDGVEVHNAKTKPREEQYNSTYRVVSVLTVLHQDWLNGKEYKCKVSNKALPAPIEKTISKAKGQPREPQVYTLPPSREEMTKNQVSLTCLVKGFYPSDIAVEWESNGQPENNYKTTPPVLDSDGSFFLYSKLTVDKSRWQQGNVFSCSVMHEALHNHYTQKSLSLSPGK

SEQ ID NO: 970 - protein, 450 aa, synthetic construct
  source 1..450: note = XENP42099 Chain 1- 1D7B4[NKG2D]_H1.31_IgG1_PVA_/S267K
EVQLLESGGGLVQPGGSLRLSCAASGFTFSSYAMSWVRQAPGKGLEWVSSISASGGSTYYADSVKGRFTISRDNSKNTLYLQMNSLRAEDTAVYYCAKGIFSIAFFYFDYWGQGTLVTVSSASTKGPSVFPLAPSSKSTSGGTAALGCLVKDYFPEPVTVSWNSGALTSGVHTFPAVLQSSGLYSLSSVVTVPSSSLGTQTYICNVNHKPSNTKVDKKVEPKSCDKTHTCPPCPAPPVAGPSVFLFPPKPKDTLMISRTPEVTCVVVDVKHEDPEVKFNWYVDGVEVHNAKTKPREEQYNSTYRVVSVLTVLHQDWLNGKEYKCKVSNKALPAPIEKTISKAKGQPREPQVYTLPPSREEMTKNQVSLTCLVKGFYPSDIAVEWESNGQPENNYKTTPPVLDSDGSFFLYSKLTVDKSRWQQGNVFSCSVMHEALHNHYTQKSLSLSPGK

SEQ ID NO: 971 - protein, 450 aa, synthetic construct
  source 1..450: note = XENP42100 Chain 1- 1D7B4[NKG2D]_H1.32_IgG1_PVA_/S267K
EVQLLESGGGLVQPGGSLRLSCAASGFTFSSYAMSWVRQAPGKGLEWVSSISASGGSTYYADSVKGRFTISRDNSKNTLYLQMNSLRAEDTAVYYCAKGIFSISFFYFDYWGQGTLVTVSSASTKGPSVFPLAPSSKSTSGGTAALGCLVKDYFPEPVTVSWNSGALTSGVHTFPAVLQSSGLYSLSSVVTVPSSSLGTQTYICNVNHKPSNTKVDKKVEPKSCDKTHTCPPCPAPPVAGPSVFLFPPKPKDTLMISRTPEVTCVVVDVKHEDPEVKFNWYVDGVEVHNAKTKPREEQYNSTYRVVSVLTVLHQDWLNGKEYKCKVSNKALPAPIEKTISKAKGQPREPQVYTLPPSREEMTKNQVSLTCLVKGFYPSDIAVEWESNGQPENNYKTTPPVLDSDGSFFLYSKLTVDKSRWQQGNVFSCSVMHEALHNHYTQKSLSLSPGK

SEQ ID NO: 972 - protein, 450 aa, synthetic construct
  source 1..450: note = XENP42101 Chain 1- 1D7B4[NKG2D]_H1.33_IgG1_PVA_/S267K
EVQLLESGGGLVQPGGSLRLSCAASGFTFSSYAMSWVRQAPGKGLEWVSSISASGGSTYYADSVKGRFTISRDNSKNTLYLQMNSLRAEDTAVYYCAKGIFSIEFFYFDYWGQGTLVTVSSASTKGPSVFPLAPSSKSTSGGTAALGCLVKDYFPEPVTVSWNSGALTSGVHTFPAVLQSSGLYSLSSVVTVPSSSLGTQTYICNVNHKPSNTKVDKKVEPKSCDKTHTCPPCPAPPVAGPSVFLFPPKPKDTLMISRTPEVTCVVVDVKHEDPEVKFNWYVDGVEVHNAKTKPREEQYNSTYRVVSVLTVLHQDWLNGKEYKCKVSNKALPAPIEKTISKAKGQPREPQVYTLPPSREEMTKNQVSLTCLVKGFYPSDIAVEWESNGQPENNYKTTPPVLDSDGSFFLYSKLTVDKSRWQQGNVFSCSVMHEALHNHYTQKSLSLSPGK

SEQ ID NO: 973 - protein, 450 aa, synthetic construct
  source 1..450: note = XENP42102 Chain 1- 1D7B4[NKG2D]_H1.34_IgG1_PVA_/S267K
EVQLLESGGGLVQPGGSLRLSCAASGFTFSSYAMSWVRQAPGKGLEWVSSISASGGSTYYADSVKGRFTISRDNSKNTLYLQMNSLRAEDTAVYYCAKGIFSIQFFYFDYWGQGTLVTVSSASTKGPSVFPLAPSSKSTSGGTAALGCLVKDYFPEPVTVSWNSGALTSGVHTFPAVLQSSGLYSLSSVVTVPSSSLGTQTYICNVNHKPSNTKVDKKVEPKSCDKTHTCPPCPAPPVAGPSVFLFPPKPKDTLMISRTPEVTCVVVDVKHEDPEVKFNWYVDGVEVHNAKTKPREEQYNSTYRVVSVLTVLHQDWLNGKEYKCKVSNKALPAPIEKTISKAKGQPREPQVYTLPPSREEMTKNQVSLTCLVKGFYPSDIAVEWESNGQPENNYKTTPPVLDSDGSFFLYSKLTVDKSRWQQGNVFSCSVMHEALHNHYTQKSLSLSPGK

SEQ ID NO: 974 - protein, 450 aa, synthetic construct
  source 1..450: note = XENP42103 Chain 1- 1D7B4[NKG2D]_H1.35_IgG1_PVA_/S267K
EVQLLESGGGLVQPGGSLRLSCAASGFTFSSYAMSWVRQAPGKGLEWVSSISASGGSTYYADSVKGRFTISRDNSKNTLYLQMNSLRAEDTAVYYCAKGIFSILFFYFDYWGQGTLVTVSSASTKGPSVFPLAPSSKSTSGGTAALGCLVKDYFPEPVTVSWNSGALTSGVHTFPAVLQSSGLYSLSSVVTVPSSSLGTQTYICNVNHKPSNTKVDKKVEPKSCDKTHTCPPCPAPPVAGPSVFLFPPKPKDTLMISRTPEVTCVVVDVKHEDPEVKFNWYVDGVEVHNAKTKPREEQYNSTYRVVSVLTVLHQDWLNGKEYKCKVSNKALPAPIEKTISKAKGQPREPQVYTLPPSREEMTKNQVSLTCLVKGFYPSDIAVEWESNGQPENNYKTTPPVLDSDGSFFLYSKLTVDKSRWQQGNVFSCSVMHEALHNHYTQKSLSLSPGK

SEQ ID NO: 975 - protein, 450 aa, synthetic construct
  source 1..450: note = XENP42104 Chain 1- 1D7B4[NKG2D]_H1.36_IgG1_PVA_/S267K
EVQLLESGGGLVQPGGSLRLSCAASGFTFSSYAMSWVRQAPGKGLEWVSSISASGGSTYYADSVKGRFTISRDNSKNTLYLQMNSLRAEDTAVYYCAKGIFSIYHFYFDYWGQGTLVTVSSASTKGPSVFPLAPSSKSTSGGTAALGCLVKDYFPEPVTVSWNSGALTSGVHTFPAVLQSSGLYSLSSVVTVPSSSLGTQTYICNVNHKPSNTKVDKKVEPKSCDKTHTCPPCPAPPVAGPSVFLFPPKPKDTLMISRTPEVTCVVVDVKHEDPEVKFNWYVDGVEVHNAKTKPREEQYNSTYRVVSVLTVLHQDWLNGKEYKCKVSNKALPAPIEKTISKAKGQPREPQVYTLPPSREEMTKNQVSLTCLVKGFYPSDIAVEWESNGQPENNYKTTPPVLDSDGSFFLYSKLTVDKSRWQQGNVFSCSVMHEALHNHYTQKSLSLSPGK

SEQ ID NO: 976 - protein, 450 aa, synthetic construct
  source 1..450: note = XENP42105 Chain 1- 1D7B4[NKG2D]_H1.37_IgG1_PVA_/S267K
EVQLLESGGGLVQPGGSLRLSCAASGFTFSSYAMSWVRQAPGKGLEWVSSISASGGSTYYADSVKGRFTISRDNSKNTLYLQMNSLRAEDTAVYYCAKGIFSIYAFYFDYWGQGTLVTVSSASTKGPSVFPLAPSSKSTSGGTAALGCLVKDYFPEPVTVSWNSGALTSGVHTFPAVLQSSGLYSLSSVVTVPSSSLGTQTYICNVNHKPSNTKVDKKVEPKSCDKTHTCPPCPAPPVAGPSVFLFPPKPKDTLMISRTPEVTCVVVDVKHEDPEVKFNWYVDGVEVHNAKTKPREEQYNSTYRVVSVLTVLHQDWLNGKEYKCKVSNKALPAPIEKTISKAKGQPREPQVYTLPPSREEMTKNQVSLTCLVKGFYPSDIAVEWESNGQPENNYKTTPPVLDSDGSFFLYSKLTVDKSRWQQGNVFSCSVMHEALHNHYTQKSLSLSPGK

SEQ ID NO: 977 - protein, 450 aa, synthetic construct
  source 1..450: note = XENP42106 Chain 1- 1D7B4[NKG2D]_H1.38_IgG1_PVA_/S267K
EVQLLESGGGLVQPGGSLRLSCAASGFTFSSYAMSWVRQAPGKGLEWVSSISASGGSTYYADSVKGRFTISRDNSKNTLYLQMNSLRAEDTAVYYCAKGIFSIYSFYFDYWGQGTLVTVSSASTKGPSVFPLAPSSKSTSGGTAALGCLVKDYFPEPVTVSWNSGALTSGVHTFPAVLQSSGLYSLSSVVTVPSSSLGTQTYICNVNHKPSNTKVDKKVEPKSCDKTHTCPPCPAPPVAGPSVFLFPPKPKDTLMISRTPEVTCVVVDVKHEDPEVKFNWYVDGVEVHNAKTKPREEQYNSTYRVVSVLTVLHQDWLNGKEYKCKVSNKALPAPIEKTISKAKGQPREPQVYTLPPSREEMTKNQVSLTCLVKGFYPSDIAVEWESNGQPENNYKTTPPVLDSDGSFFLYSKLTVDKSRWQQGNVFSCSVMHEALHNHYTQKSLSLSPGK

SEQ ID NO: 978 - protein, 450 aa, synthetic construct
  source 1..450: note = XENP42107 Chain 1- 1D7B4[NKG2D]_H1.39_IgG1_PVA_/S267K
EVQLLESGGGLVQPGGSLRLSCAASGFTFSSYAMSWVRQAPGKGLEWVSSISASGGSTYYADSVKGRFTISRDNSKNTLYLQMNSLRAEDTAVYYCAKGIFSIYEFYFDYWGQGTLVTVSSASTKGPSVFPLAPSSKSTSGGTAALGCLVKDYFPEPVTVSWNSGALTSGVHTFPAVLQSSGLYSLSSVVTVPSSSLGTQTYICNVNHKPSNTKVDKKVEPKSCDKTHTCPPCPAPPVAGPSVFLFPPKPKDTLMISRTPEVTCVVVDVKHEDPEVKFNWYVDGVEVHNAKTKPREEQYNSTYRVVSVLTVLHQDWLNGKEYKCKVSNKALPAPIEKTISKAKGQPREPQVYTLPPSREEMTKNQVSLTCLVKGFYPSDIAVEWESNGQPENNYKTTPPVLDSDGSFFLYSKLTVDKSRWQQGNVFSCSVMHEALHNHYTQKSLSLSPGK

SEQ ID NO: 979 - protein, 450 aa, synthetic construct
  source 1..450: note = XENP42108 Chain 1- 1D7B4[NKG2D]_H1.40_IgG1_PVA_/S267K
EVQLLESGGGLVQPGGSLRLSCAASGFTFSSYAMSWVRQAPGKGLEWVSSISASGGSTYYADSVKGRFTISRDNSKNTLYLQMNSLRAEDTAVYYCAKGIFSIYQFYFDYWGQGTLVTVSSASTKGPSVFPLAPSSKSTSGGTAALGCLVKDYFPEPVTVSWNSGALTSGVHTFPAVLQSSGLYSLSSVVTVPSSSLGTQTYICNVNHKPSNTKVDKKVEPKSCDKTHTCPPCPAPPVAGPSVFLFPPKPKDTLMISRTPEVTCVVVDVKHEDPEVKFNWYVDGVEVHNAKTKPREEQYNSTYRVVSVLTVLHQDWLNGKEYKCKVSNKALPAPIEKTISKAKGQPREPQVYTLPPSREEMTKNQVSLTCLVKGFYPSDIAVEWESNGQPENNYKTTPPVLDSDGSFFLYSKLTVDKSRWQQGNVFSCSVMHEALHNHYTQKSLSLSPGK

SEQ ID NO: 980 - protein, 450 aa, synthetic construct
  source 1..450: note = XENP42109 Chain 1- 1D7B4[NKG2D]_H1.41_IgG1_PVA_/S267K
EVQLLESGGGLVQPGGSLRLSCAASGFTFSSYAMSWVRQAPGKGLEWVSSISASGGSTYYADSVKGRFTISRDNSKNTLYLQMNSLRAEDTAVYYCAKGIFSIYLFYFDYWGQGTLVTVSSASTKGPSVFPLAPSSKSTSGGTAALGCLVKDYFPEPVTVSWNSGALTSGVHTFPAVLQSSGLYSLSSVVTVPSSSLGTQTYICNVNHKPSNTKVDKKVEPKSCDKTHTCPPCPAPPVAGPSVFLFPPKPKDTLMISRTPEVTCVVVDVKHEDPEVKFNWYVDGVEVHNAKTKPREEQYNSTYRVVSVLTVLHQDWLNGKEYKCKVSNKALPAPIEKTISKAKGQPREPQVYTLPPSREEMTKNQVSLTCLVKGFYPSDIAVEWESNGQPENNYKTTPPVLDSDGSFFLYSKLTVDKSRWQQGNVFSCSVMHEALHNHYTQKSLSLSPGK

SEQ ID NO: 981 - protein, 450 aa, synthetic construct
  source 1..450: note = XENP42110 Chain 1- 1D7B4[NKG2D]_H1.42_IgG1_PVA_/S267K
EVQLLESGGGLVQPGGSLRLSCAASGFTFSSYAMSWVRQAPGKGLEWVSSISASGGSTYYADSVKGRFTISRDNSKNTLYLQMNSLRAEDTAVYYCAKGIFSIYFHYFDYWGQGTLVTVSSASTKGPSVFPLAPSSKSTSGGTAALGCLVKDYFPEPVTVSWNSGALTSGVHTFPAVLQSSGLYSLSSVVTVPSSSLGTQTYICNVNHKPSNTKVDKKVEPKSCDKTHTCPPCPAPPVAGPSVFLFPPKPKDTLMISRTPEVTCVVVDVKHEDPEVKFNWYVDGVEVHNAKTKPREEQYNSTYRVVSVLTVLHQDWLNGKEYKCKVSNKALPAPIEKTISKAKGQPREPQVYTLPPSREEMTKNQVSLTCLVKGFYPSDIAVEWESNGQPENNYKTTPPVLDSDGSFFLYSKLTVDKSRWQQGNVFSCSVMHEALHNHYTQKSLSLSPGK

SEQ ID NO: 982 - protein, 450 aa, synthetic construct
  source 1..450: note = XENP42111 Chain 1- 1D7B4[NKG2D]_H1.43_IgG1_PVA_/S267K
EVQLLESGGGLVQPGGSLRLSCAASGFTFSSYAMSWVRQAPGKGLEWVSSISASGGSTYYADSVKGRFTISRDNSKNTLYLQMNSLRAEDTAVYYCAKGIFSIYFAYFDYWGQGTLVTVSSASTKGPSVFPLAPSSKSTSGGTAALGCLVKDYFPEPVTVSWNSGALTSGVHTFPAVLQSSGLYSLSSVVTVPSSSLGTQTYICNVNHKPSNTKVDKKVEPKSCDKTHTCPPCPAPPVAGPSVFLFPPKPKDTLMISRTPEVTCVVVDVKHEDPEVKFNWYVDGVEVHNAKTKPREEQYNSTYRVVSVLTVLHQDWLNGKEYKCKVSNKALPAPIEKTISKAKGQPREPQVYTLPPSREEMTKNQVSLTCLVKGFYPSDIAVEWESNGQPENNYKTTPPVLDSDGSFFLYSKLTVDKSRWQQGNVFSCSVMHEALHNHYTQKSLSLSPGK

SEQ ID NO: 983 - protein, 450 aa, synthetic construct
  source 1..450: note = XENP42112 Chain 1- 1D7B4[NKG2D]_H1.44_IgG1_PVA_/S267K
EVQLLESGGGLVQPGGSLRLSCAASGFTFSSYAMSWVRQAPGKGLEWVSSISASGGSTYYADSVKGRFTISRDNSKNTLYLQMNSLRAEDTAVYYCAKGIFSIYFSYFDYWGQGTLVTVSSASTKGPSVFPLAPSSKSTSGGTAALGCLVKDYFPEPVTVSWNSGALTSGVHTFPAVLQSSGLYSLSSVVTVPSSSLGTQTYICNVNHKPSNTKVDKKVEPKSCDKTHTCPPCPAPPVAGPSVFLFPPKPKDTLMISRTPEVTCVVVDVKHEDPEVKFNWYVDGVEVHNAKTKPREEQYNSTYRVVSVLTVLHQDWLNGKEYKCKVSNKALPAPIEKTISKAKGQPREPQVYTLPPSREEMTKNQVSLTCLVKGFYPSDIAVEWESNGQPENNYKTTPPVLDSDGSFFLYSKLTVDKSRWQQGNVFSCSVMHEALHNHYTQKSLSLSPGK

SEQ ID NO: 984 - protein, 450 aa, synthetic construct
  source 1..450: note = XENP42113 Chain 1- 1D7B4[NKG2D]_H1.45_IgG1_PVA_/S267K
EVQLLESGGGLVQPGGSLRLSCAASGFTFSSYAMSWVRQAPGKGLEWVSSISASGGSTYYADSVKGRFTISRDNSKNTLYLQMNSLRAEDTAVYYCAKGIFSIYFEYFDYWGQGTLVTVSSASTKGPSVFPLAPSSKSTSGGTAALGCLVKDYFPEPVTVSWNSGALTSGVHTFPAVLQSSGLYSLSSVVTVPSSSLGTQTYICNVNHKPSNTKVDKKVEPKSCDKTHTCPPCPAPPVAGPSVFLFPPKPKDTLMISRTPEVTCVVVDVKHEDPEVKFNWYVDGVEVHNAKTKPREEQYNSTYRVVSVLTVLHQDWLNGKEYKCKVSNKALPAPIEKTISKAKGQPREPQVYTLPPSREEMTKNQVSLTCLVKGFYPSDIAVEWESNGQPENNYKTTPPVLDSDGSFFLYSKLTVDKSRWQQGNVFSCSVMHEALHNHYTQKSLSLSPGK

SEQ ID NO: 985 - protein, 450 aa, synthetic construct
  source 1..450: note = XENP42114 Chain 1- 1D7B4[NKG2D]_H1.46_IgG1_PVA_/S267K
EVQLLESGGGLVQPGGSLRLSCAASGFTFSSYAMSWVRQAPGKGLEWVSSISASGGSTYYADSVKGRFTISRDNSKNTLYLQMNSLRAEDTAVYYCAKGIFSIYFQYFDYWGQGTLVTVSSASTKGPSVFPLAPSSKSTSGGTAALGCLVKDYFPEPVTVSWNSGALTSGVHTFPAVLQSSGLYSLSSVVTVPSSSLGTQTYICNVNHKPSNTKVDKKVEPKSCDKTHTCPPCPAPPVAGPSVFLFPPKPKDTLMISRTPEVTCVVVDVKHEDPEVKFNWYVDGVEVHNAKTKPREEQYNSTYRVVSVLTVLHQDWLNGKEYKCKVSNKALPAPIEKTISKAKGQPREPQVYTLPPSREEMTKNQVSLTCLVKGFYPSDIAVEWESNGQPENNYKTTPPVLDSDGSFFLYSKLTVDKSRWQQGNVFSCSVMHEALHNHYTQKSLSLSPGK

SEQ ID NO: 986 - protein, 450 aa, synthetic construct
  source 1..450: note = XENP42115 Chain 1- 1D7B4[NKG2D]_H1.47_IgG1_PVA_/S267K
EVQLLESGGGLVQPGGSLRLSCAASGFTFSSYAMSWVRQAPGKGLEWVSSISASGGSTYYADSVKGRFTISRDNSKNTLYLQMNSLRAEDTAVYYCAKGIFSIYFLYFDYWGQGTLVTVSSASTKGPSVFPLAPSSKSTSGGTAALGCLVKDYFPEPVTVSWNSGALTSGVHTFPAVLQSSGLYSLSSVVTVPSSSLGTQTYICNVNHKPSNTKVDKKVEPKSCDKTHTCPPCPAPPVAGPSVFLFPPKPKDTLMISRTPEVTCVVVDVKHEDPEVKFNWYVDGVEVHNAKTKPREEQYNSTYRVVSVLTVLHQDWLNGKEYKCKVSNKALPAPIEKTISKAKGQPREPQVYTLPPSREEMTKNQVSLTCLVKGFYPSDIAVEWESNGQPENNYKTTPPVLDSDGSFFLYSKLTVDKSRWQQGNVFSCSVMHEALHNHYTQKSLSLSPGK

SEQ ID NO: 987 - protein, 450 aa, synthetic construct
  source 1..450: note = XENP42116 Chain 1- 1D7B4[NKG2D]_H1.48_IgG1_PVA_/S267K
EVQLLESGGGLVQPGGSLRLSCAASGFTFSSYAMSWVRQAPGKGLEWVSSISASGGSTYYADSVKGRFTISRDNSKNTLYLQMNSLRAEDTAVYYCAKGIFSIYFFYHDYWGQGTLVTVSSASTKGPSVFPLAPSSKSTSGGTAALGCLVKDYFPEPVTVSWNSGALTSGVHTFPAVLQSSGLYSLSSVVTVPSSSLGTQTYICNVNHKPSNTKVDKKVEPKSCDKTHTCPPCPAPPVAGPSVFLFPPKPKDTLMISRTPEVTCVVVDVKHEDPEVKFNWYVDGVEVHNAKTKPREEQYNSTYRVVSVLTVLHQDWLNGKEYKCKVSNKALPAPIEKTISKAKGQPREPQVYTLPPSREEMTKNQVSLTCLVKGFYPSDIAVEWESNGQPENNYKTTPPVLDSDGSFFLYSKLTVDKSRWQQGNVFSCSVMHEALHNHYTQKSLSLSPGK

SEQ ID NO: 988 - protein, 447 aa, synthetic construct
  source 1..447: note = XENP41021 Chain 1-38E2[B7H3]_H2_IgG1_pI(-)_Isosteric_A_L368D/K370S-Fc(216)_ IgG1_C220S/S364K/E357Q
EVQLLESGGGLVQPGGSLRLSCAVSGFSLSSYGVIWVRQAPGKGLEYVSWVSSGGSTNYASSVKGRFTISRDTSKNTVYLQMNSLRAEDTAVYFCARGATNSGTDIWGPGTLVTVSSASTKGPSVFPLAPSSKSTSGGTAALGCLVKDYFPEPVTVSWNSGALTSGVHTFPAVLQSSGLYSLSSVVTVPSSSLGTQTYICNVNHKPSDTKVDKKVEPKSCDKTHTCPPCPAPELLGGPSVFLFPPKPKDTLMISRTPEVTCVVVDVSHEDPEVKFNWYVDGVEVHNAKTKPREEEYNSTYRVVSVLTVLHQDWLNGKEYKCKVSNKALPAPIEKTISKAKGQPREPQVYTLPPSREEMTKNQVSLTCDVSGFYPSDIAVEWESDGQPENNYKTTPPVLDSDGSFFLYSKLTVDKSRWEQGDVFSCSVMHEALHNHYTQKSLSLSPGK

SEQ ID NO: 989 - protein, 479 aa, synthetic construct
  source 1..479: note = XENP41021 Chain 2-38E2[B7H3]_H2_L1.1_scFv(GKPGS)4_IgG1_C220S/S364K/E357Q
EVQLLESGGGLVQPGGSLRLSCAVSGFSLSSYGVIWVRQAPGKGLEYVSWVSSGGSTNYASSVKGRFTISRDTSKNTVYLQMNSLRAEDTAVYFCARGATNSGTDIWGPGTLVTVSSGKPGSGKPGSGKPGSGKPGSDIVMTQSPSSLSASVGDRVTITCRASQSINSWLSWYQQKPGKPPKLLIYGASNLASGVPSRFKGSGSGTDFTLTISSLQPEDFATYYCQNNYGIIAAGATFGGGTKVEIKEPKSSDKTHTCPPCPAPELLGGPSVFLFPPKPKDTLMISRTPEVTCVVVDVSHEDPEVKFNWYVDGVEVHNAKTKPREEQYNSTYRVVSVLTVLHQDWLNGKEYKCKVSNKALPAPIEKTISKAKGQPREPQVYTLPPSREQMTKNQVKLTCLVKGFYPSDIAVEWESNGQPENNYKTTPPVLDSDGSFFLYSKLTVDKSRWQQGNVFSCSVMHEALHNHYTQKSLSLSPGK

SEQ ID NO: 990 - protein, 447 aa, synthetic construct; identical to SEQ ID NO: 4
  source 1..447: note = XENP41022 Chain 1-38E2[B7H3]_H2_IgG1_pI(-)_Isosteric_A_S239D/I332E/L368D/K3 70S

SEQ ID NO: 991 - protein, 479 aa, synthetic construct
  source 1..479: note = XENP41022 Chain 2-38E2[B7H3]_H2_L1.1_scFv(GKPGS)4-Fc(216)_IgG1_C220S/S239D/ I332E/S364K/E357Q
EVQLLESGGGLVQPGGSLRLSCAVSGFSLSSYGVIWVRQAPGKGLEYVSWVSSGGSTNYASSVKGRFTISRDTSKNTVYLQMNSLRAEDTAVYFCARGATNSGTDIWGPGTLVTVSSGKPGSGKPGSGKPGSGKPGSDIVMTQSPSSLSASVGDRVTITCRASQSINSWLSWYQQKPGKPPKLLIYGASNLASGVPSRFKGSGSGTDFTLTISSLQPEDFATYYCQNNYGIIAAGATFGGGTKVEIKEPKSSDKTHTCPPCPAPELLGGPDVFLFPPKPKDTLMISRTPEVTCVVVDVSHEDPEVKFNWYVDGVEVHNAKTKPREEQYNSTYRVVSVLTVLHQDWLNGKEYKCKVSNKALPAPEEKTISKAKGQPREPQVYTLPPSREQMTKNQVKLTCLVKGFYPSDIAVEWESNGQPENNYKTTPPVLDSDGSFFLYSKLTVDKSRWQQGNVFSCSVMHEALHNHYTQKSLSLSPGK

SEQ ID NO: 992 - protein, 447 aa, synthetic construct
  source 1..447: note = XENP41023 Chain 1-38E2[B7H3]_H2_IgG1_pI(-)_Isosteric_A_L368D/K370S/S239D
EVQLLESGGGLVQPGGSLRLSCAVSGFSLSSYGVIWVRQAPGKGLEYVSWVSSGGSTNYASSVKGRFTISRDTSKNTVYLQMNSLRAEDTAVYFCARGATNSGTDIWGPGTLVTVSSASTKGPSVFPLAPSSKSTSGGTAALGCLVKDYFPEPVTVSWNSGALTSGVHTFPAVLQSSGLYSLSSVVTVPSSSLGTQTYICNVNHKPSDTKVDKKVEPKSCDKTHTCPPCPAPELLGGPDVFLFPPKPKDTLMISRTPEVTCVVVDVSHEDPEVKFNWYVDGVEVHNAKTKPREEEYNSTYRVVSVLTVLHQDWLNGKEYKCKVSNKALPAPIEKTISKAKGQPREPQVYTLPPSREEMTKNQVSLTCDVSGFYPSDIAVEWESDGQPENNYKTTPPVLDSDGSFFLYSKLTVDKSRWEQGDVFSCSVMHEALHNHYTQKSLSLSPGK

SEQ ID NO: 993 - protein, 479 aa, synthetic construct
  source 1..479: note = XENP41023 Chain 2-38E2[B7H3]_H2_L1.1_scFv(GKPGS)4-Fc(216)_IgG1_C220S/S364K/ E357Q/S239D
EVQLLESGGGLVQPGGSLRLSCAVSGFSLSSYGVIWVRQAPGKGLEYVSWVSSGGSTNYASSVKGRFTISRDTSKNTVYLQMNSLRAEDTAVYFCARGATNSGTDIWGPGTLVTVSSGKPGSGKPGSGKPGSGKPGSDIVMTQSPSSLSASVGDRVTITCRASQSINSWLSWYQQKPGKPPKLLIYGASNLASGVPSRFKGSGSGTDFTLTISSLQPEDFATYYCQNNYGIIAAGATFGGGTKVEIKEPKSSDKTHTCPPCPAPELLGGPDVFLFPPKPKDTLMISRTPEVTCVVVDVSHEDPEVKFNWYVDGVEVHNAKTKPREEQYNSTYRVVSVLTVLHQDWLNGKEYKCKVSNKALPAPIEKTISKAKGQPREPQVYTLPPSREQMTKNQVKLTCLVKGFYPSDIAVEWESNGQPENNYKTTPPVLDSDGSFFLYSKLTVDKSRWQQGNVFSCSVMHEALHNHYTQKSLSLSPGK

SEQ ID NO: 994 - protein, 447 aa, synthetic construct
  source 1..447: note = XENP41024 Chain 1-38E2[B7H3]_H2_IgG1_pI(-)_Isosteric_A_L368D/K370S/I332E
EVQLLESGGGLVQPGGSLRLSCAVSGFSLSSYGVIWVRQAPGKGLEYVSWVSSGGSTNYASSVKGRFTISRDTSKNTVYLQMNSLRAEDTAVYFCARGATNSGTDIWGPGTLVTVSSASTKGPSVFPLAPSSKSTSGGTAALGCLVKDYFPEPVTVSWNSGALTSGVHTFPAVLQSSGLYSLSSVVTVPSSSLGTQTYICNVNHKPSDTKVDKKVEPKSCDKTHTCPPCPAPELLGGPSVFLFPPKPKDTLMISRTPEVTCVVVDVSHEDPEVKFNWYVDGVEVHNAKTKPREEEYNSTYRVVSVLTVLHQDWLNGKEYKCKVSNKALPAPEEKTISKAKGQPREPQVYTLPPSREEMTKNQVSLTCDVSGFYPSDIAVEWESDGQPENNYKTTPPVLDSDGSFFLYSKLTVDKSRWEQGDVFSCSVMHEALHNHYTQKSLSLSPGK

SEQ ID NO: 995 - protein, 479 aa, synthetic construct
  source 1..479: note = XENP41024 Chain 2-38E2[B7H3]_H2_L1.1_scFv(GKPGS)4-Fc(216)_IgG1_C220S/S364K/ E357Q/I332E
EVQLLESGGGLVQPGGSLRLSCAVSGFSLSSYGVIWVRQAPGKGLEYVSWVSSGGSTNYASSVKGRFTISRDTSKNTVYLQMNSLRAEDTAVYFCARGATNSGTDIWGPGTLVTVSSGKPGSGKPGSGKPGSGKPGSDIVMTQSPSSLSASVGDRVTITCRASQSINSWLSWYQQKPGKPPKLLIYGASNLASGVPSRFKGSGSGTDFTLTISSLQPEDFATYYCQNNYGIIAAGATFGGGTKVEIKEPKSSDKTHTCPPCPAPELLGGPSVFLFPPKPKDTLMISRTPEVTCVVVDVSHEDPEVKFNWYVDGVEVHNAKTKPREEQYNSTYRVVSVLTVLHQDWLNGKEYKCKVSNKALPAPEEKTISKAKGQPREPQVYTLPPSREQMTKNQVKLTCLVKGFYPSDIAVEWESNGQPENNYKTTPPVLDSDGSFFLYSKLTVDKSRWQQGNVFSCSVMHEALHNHYTQKSLSLSPGK

SEQ ID NO: 996 - protein, 447 aa, synthetic construct; identical to SEQ ID NO: 988
  source 1..447: note = XENP41025 Chain 1-38E2[B7H3]_H2_IgG1_pI(-)_Isosteric_A_L368D/K370S

SEQ ID NO: 997 - protein, 479 aa, synthetic construct; identical to SEQ ID NO: 991
  source 1..479: note = XENP41025 Chain 2-38E2[B7H3]_H2_L1.1_scFv(GKPGS)4-Fc(216)_IgG1_C220S/S239D/ I332E/S364K/E357Q

SEQ ID NO: 998 - protein, 447 aa, synthetic construct; identical to SEQ ID NO: 988
  source 1..447: note = XENP41026 Chain 1-38E2[B7H3]_H2_IgG1_pI(-)_Isosteric_A_L368D/K370S

SEQ ID NO: 999 - protein, 479 aa, synthetic construct; identical to SEQ ID NO: 993
  source 1..479: note = XENP41026 Chain 2-38E2[B7H3]_H2_L1.1_scFv(GKPGS)4-Fc(216)_IgG1_C220S/S364K/ E357Q/S239D

SEQ ID NO: 1000 - protein, 447 aa, synthetic construct; identical to SEQ ID NO: 988
  source 1..447: note = XENP41027 Chain 1-38E2[B7H3]_H2_IgG1_pI(-)_Isosteric_A_L368D/K370S

SEQ ID NO: 1001 - protein, 479 aa, synthetic construct; identical to SEQ ID NO: 995
  source 1..479: note = XENP41027 Chain 2-38E2[B7H3]_H2_L1.1_scFv(GKPGS)4-Fc(216)_IgG1_C220S/S364K/ E357Q/I332E

SEQ ID NO: 1002 - protein, 447 aa, synthetic construct; identical to SEQ ID NO: 4
  source 1..447: note = XENP41028 Chain 1-38E2[B7H3]_H2_IgG1_pI(-)_Isosteric_A_S239D/I332E/L368D/K3 70S

SEQ ID NO: 1003 - protein, 479 aa, synthetic construct; identical to SEQ ID NO: 989
  source 1..479: note = XENP41028 Chain 2-38E2[B7H3]_H2_L1.1_scFv(GKPGS)4-Fc(216)_IgG1_C220S/S364K/ E357Q

SEQ ID NO: 1004 - protein, 447 aa, synthetic construct; identical to SEQ ID NO: 992
  source 1..447: note = XENP41029 Chain 1-38E2[B7H3]_H2_IgG1_pI(-)_Isosteric_A_L368D/K370S/S239D

SEQ ID NO: 1005 - protein, 479 aa, synthetic construct; identical to SEQ ID NO: 989
  source 1..479: note = XENP41029 Chain 2-38E2[B7H3]_H2_L1.1_scFv(GKPGS)4-Fc(216)_IgG1_C220S/S364K/ E357Q

SEQ ID NO: 1006 - protein, 447 aa, synthetic construct; identical to SEQ ID NO: 994
  source 1..447: note = XENP41030 Chain 1-38E2[B7H3]_H2_IgG1_pI(-)_Isosteric_A_L368D/K370S/I332E

SEQ ID NO: 1007 - protein, 479 aa, synthetic construct; identical to SEQ ID NO: 989
  source 1..479: note = XENP41030 Chain 2-38E2[B7H3]_H2_L1.1_scFv(GKPGS)4-Fc(216)_IgG1_C220S/S364K/ E357Q

SEQ ID NO: 1008 - protein, 447 aa, synthetic construct; identical to SEQ ID NO: 4
  source 1..447: note = XENP41031 Chain 1-38E2[B7H3]_H2_IgG1_pI(-)_Isosteric_A_S239D/I332E/L368D/K3 70S

SEQ ID NO: 1009 - protein, 479 aa, synthetic construct; identical to SEQ ID NO: 993
  source 1..479: note = XENP41031 Chain 2-38E2[B7H3]_H2_L1.1_scFv(GKPGS)4-Fc(216)_IgG1_C220S/S364K/ E357Q/S239D

SEQ ID NO: 1010 - protein, 447 aa, synthetic construct; identical to SEQ ID NO: 4
  source 1..447: note = XENP41032 Chain 1-38E2[B7H3]_H2_IgG1_pI(-)_Isosteric_A_S239D/I332E/L368D/K3 70S

SEQ ID NO: 1011 - protein, 479 aa, synthetic construct; identical to SEQ ID NO: 995
  source 1..479: note = XENP41032 Chain 2-38E2[B7H3]_H2_L1.1_scFv(GKPGS)4-Fc(216)_IgG1_C220S/S364K/ E357Q/I332E

SEQ ID NO: 1012 - protein, 447 aa, synthetic construct; identical to SEQ ID NO: 992
  source 1..447: note = XENP41033 Chain 1-38E2[B7H3]_H2_IgG1_pI(-)_Isosteric_A_L368D/K370S/S239D

SEQ ID NO: 1013 - protein, 479 aa, synthetic construct; identical to SEQ ID NO: 991
  source 1..479: note = XENP41033 Chain 2-38E2[B7H3]_H2_L1.1_scFv(GKPGS)4-Fc(216)_IgG1_C220S/S239D/ I332E/S364K/E357Q

SEQ ID NO: 1014 - protein, 447 aa, synthetic construct; identical to SEQ ID NO: 994
  source 1..447: note = XENP41034 Chain 1-38E2[B7H3]_H2_IgG1_pI(-)_Isosteric_A_L368D/K370S/I332E

SEQ ID NO: 1015 - protein, 479 aa, synthetic construct; identical to SEQ ID NO: 991
  source 1..479: note = XENP41034 Chain 2-38E2[B7H3]_H2_L1.1_scFv(GKPGS)4-Fc(216)_IgG1_C220S/S239D/ I332E/S364K/E357Q

SEQ ID NO: 1016 - protein, 447 aa, synthetic construct; identical to SEQ ID NO: 992
  source 1..447: note = XENP41035 Chain 1-38E2[B7H3]_H2_IgG1_pI(-)_Isosteric_A_L368D/K370S/S239D

SEQ ID NO: 1017 - protein, 479 aa, synthetic construct; identical to SEQ ID NO: 995
  source 1..479: note = XENP41035 Chain 2-38E2[B7H3]_H2_L1.1_scFv(GKPGS)4-Fc(216)_IgG1_C220S/S364K/ E357Q/I332E

SEQ ID NO: 1018 - protein, 447 aa, synthetic construct; identical to SEQ ID NO: 994
  source 1..447: note = XENP41036 Chain 1-38E2[B7H3]_H2_IgG1_pI(-)_Isosteric_A_L368D/K370S/I332E

SEQ ID NO: 1019 - protein, 479 aa, synthetic construct; identical to SEQ ID NO: 993
  source 1..479: note = XENP41036 Chain 2-38E2[B7H3]_H2_L1.1_scFv(GKPGS)4-Fc(216)_IgG1_C220S/S364K/ E357Q/S239D

SEQ ID NO: 1020 - protein, 451 aa, synthetic construct
  source 1..451: note = XENP38093 Chain 1-1D2B4[NKG2D]_H1_IgG1
EVQLLESGGGLVQPGGSLRLSCAASGFTFSSFGMSWVRQAPGKGLEWVSTISGSGSTTYYADSVKGRFTISRDNSKNTLYLQMNSLRAEDTAVYYCAKGVFSEWHYYFDYWGQGTLVTVSSASTKGPSVFPLAPSSKSTSGGTAALGCLVKDYFPEPVTVSWNSGALTSGVHTFPAVLQSSGLYSLSSVVTVPSSSLGTQTYICNVNHKPSNTKVDKKVEPKSCDKTHTCPPCPAPELLGGPSVFLFPPKPKDTLMISRTPEVTCVVVDVSHEDPEVKFNWYVDGVEVHNAKTKPREEQYNSTYRVVSVLTVLHQDWLNGKEYKCKVSNKALPAPIEKTISKAKGQPREPQVYTLPPSREEMTKNQVSLTCLVKGFYPSDIAVEWESNGQPENNYKTTPPVLDSDGSFFLYSKLTVDKSRWQQGNVFSCSVMHEALHNHYTQKSLSLSPGK

SEQ ID NO: 1021 - protein, 438 aa, synthetic construct
  source 1..438: note = Cynomolgus B7H3, extracellular domain
LEVQVPEDPVVALVGTDATLRCSFSPEPGFSLAQLNLIWQLTDTKQLVHSFTEGRDQGSAYANRTALFLDLLAQGNASLRLQRVRVADEGSFTCFVSIRDFGSAAVSLQVAAPYSKPSMTLEPNKDLRPGDTVTITCSSYRGYPEAEVFWQDGQGAPLTGNVTTSQMANEQGLFDVHSVLRVVLGANGTYSCLVRNPVLQQDAHGSITITPQRSPTGAVEVQVPEDPVVALVGTDATLRCSFSPEPGFSLAQLNLIWQLTDTKQLVHSFTEGRDQGSAYANRTALFLDLLAQGNASLRLQRVRVADEGSFTCFVSIRDFGSAAVSLQVAAPYSKPSMTLEPNKDLRPGDTVTITCSSYRGYPEAEVFWQDGQGAPLTGNVTTSQMANEQGLFDVHSVLRVVLGANGTYSCLVRNPVLQQDAHGSVTITGQPMTFPPEA

SEQ ID NO: 1022 - protein, 451 aa, synthetic construct
  source 1..451: note = XENP38094 Chain 1-1D7B4[NKG2D]_H1_IgG1
EVQLLESGGGLVQPGGSLRLSCAASGFTFSSYAMSWVRQAPGKGLEWVSSISASGGSTYYADSVKGRFTISRDNSKNTLYLQMNSLRAEDTAVYYCAKGIFSIYFFYFDYWGQGTLVTVSSASTKGPSVFPLAPSSKSTSGGTAALGCLVKDYFPEPVTVSWNSGALTSGVHTFPAVLQSSGLYSLSSVVTVPSSSLGTQTYICNVNHKPSNTKVDKKVEPKSCDKTHTCPPCPAPELLGGPSVFLFPPKPKDTLMISRTPEVTCVVVDVSHEDPEVKFNWYVDGVEVHNAKTKPREEQYNSTYRVVSVLTVLHQDWLNGKEYKCKVSNKALPAPIEKTISKAKGQPREPQVYTLPPSREEMTKNQVSLTCLVKGFYPSDIAVEWESNGQPENNYKTTPPVLDSDGSFFLYSKLTVDKSRWQQGNVFSCSVMHEALHNHYTQKSLSLSPGK

SEQ ID NO: 1023 - protein, 451 aa, synthetic construct
  source 1..451: note = XENP38097 Chain 1-ADI-27744_LB1001[NKG2D]_H0_IgG1
EVQLLESGGGLVQPGGSLRLSCAASGFTFSSYAMSWVRQAPGKGLEWVSAISGSGGSTYYADSVKGRFTISRDNSKNTLYLQMNSLRAEDTAVYYCAKDGGYYDSGAGDYWGQGTLVTVSSASTKGPSVFPLAPSSKSTSGGTAALGCLVKDYFPEPVTVSWNSGALTSGVHTFPAVLQSSGLYSLSSVVTVPSSSLGTQTYICNVNHKPSNTKVDKKVEPKSCDKTHTCPPCPAPELLGGPSVFLFPPKPKDTLMISRTPEVTCVVVDVSHEDPEVKFNWYVDGVEVHNAKTKPREEQYNSTYRVVSVLTVLHQDWLNGKEYKCKVSNKALPAPIEKTISKAKGQPREPQVYTLPPSREEMTKNQVSLTCLVKGFYPSDIAVEWESNGQPENNYKTTPPVLDSDGSFFLYSKLTVDKSRWQQGNVFSCSVMHEALHNHYTQKSLSLSPGK

SEQ ID NO: 1024 - protein, 214 aa, synthetic construct; identical to SEQ ID NO: 173
  source 1..214: note = XENP38097 Chain 2-ADI-27744_LB1001[NKG2D]_L0_Light Chain

SEQ ID NO: 1025 - protein, 452 aa, synthetic construct
  source 1..452: note = XENP38098 Chain 1-ADI-27749_LB1002[NKG2D]_H0_IgG1
EVQLVESGGGLVKPGGSLRLSCAASGFTFSSYSMNWVRQAPGKGLEWVSSISSSSSYIYYADSVKGRFTISRDNAKNSLYLQMNSLRAEDTAVYYCARGAPMGAAAGWFDPWGQGTLVTVSSASTKGPSVFPLAPSSKSTSGGTAALGCLVKDYFPEPVTVSWNSGALTSGVHTFPAVLQSSGLYSLSSVVTVPSSSLGTQTYICNVNHKPSNTKVDKKVEPKSCDKTHTCPPCPAPELLGGPSVFLFPPKPKDTLMISRTPEVTCVVVDVSHEDPEVKFNWYVDGVEVHNAKTKPREEQYNSTYRVVSVLTVLHQDWLNGKEYKCKVSNKALPAPIEKTISKAKGQPREPQVYTLPPSREEMTKNQVSLTCLVKGFYPSDIAVEWESNGQPENNYKTTPPVLDSDGSFFLYSKLTVDKSRWQQGNVFSCSVMHEALHNHYTQKSLSLSPGK

SEQ ID NO: 1026 - protein, 214 aa, synthetic construct; identical to SEQ ID NO: 176
  source 1..214: note = XENP38098 Chain 2-ADI-27749_LB1002[NKG2D]_L0_Light Chain

SEQ ID NO: 1027 - protein, 450 aa, synthetic construct; identical to SEQ ID NO: 170
  source 1..450: note = XENP40097 Chain 1-Numax[RSV]_H1_FabIgG1_pI(-)_Isosteric_A_S239D/I332E/L368D /K370S

SEQ ID NO: 1028 - protein, 479 aa, synthetic construct; identical to SEQ ID NO: 991
  source 1..479: note = XENP40097 Chain 2-38E2[B7H3]_H2_L1.1_scFv(GKPGS)4-Fc(216)_IgG1_C220S/S239D/ I332E/S364K/E357Q

SEQ ID NO: 1029 - protein, 213 aa, synthetic construct; identical to SEQ ID NO: 171
  source 1..213: note = XENP40097 Chain 3-Numax[RSV]_L1_Light Chain

SEQ ID NO: 1030 - protein, 451 aa, synthetic construct; identical to SEQ ID NO: 1
  source 1..451: note = XENP40106 Chain 1-1D7B4[NKG2D]_H1_Fab-IgG1_pI(-)_Isosteric_A_S239D/I332E/L3 68D/K370S

SEQ ID NO: 1031 - protein, 479 aa, synthetic construct; identical to SEQ ID NO: 991
  source 1..479: note = XENP40106 Chain 2-38E2[B7H3]_H2_L1.1_scFv(GKPGS)4-Fc(216)_IgG1_C220S/S239D/ I332E/S364K/E357Q

SEQ ID NO: 1032 - protein, 447 aa, synthetic construct; identical to SEQ ID NO: 988
  source 1..447: note = XENP40369 Chain 1-38E2[B7H3]_H2_Fab-IgG1_pI(-)_Isosteric_A_L368D/K370S

SEQ ID NO: 1033 - protein, 478 aa, synthetic construct
  source 1..478: note = XENP40369 Chain 2-38E2[B7H3]_H2_L1.1_Fab-Numax_VHVL_scFv(GKPGS)4-Fc(216)_Ig G1_C220S/S364K/E357Q
QVTLRESGPALVKPTQTLTLTCTFSGFSLSTAGMSVGWIRQPPGKALEWLADIWWDDKKHYNPSLKDRLTISKDTSKNQVVLKVTNMDPADTATYYCARDMIFNFYFDVWGQGTTVTVSSGKPGSGKPGSGKPGSGKPGSDIQMTQSPSTLSASVGDRVTITCSASSRVGYMHWYQQKPGKAPKLLIYDTSKLASGVPSRFSGSGSGTEFTLTISSLQPDDFATYYCFQGSGYPFTFGGGTKVEIKEPKSSDKTHTCPPCPAPELLGGPSVFLFPPKPKDTLMISRTPEVTCVVVDVSHEDPEVKFNWYVDGVEVHNAKTKPREEQYNSTYRVVSVLTVLHQDWLNGKEYKCKVSNKALPAPIEKTISKAKGQPREPQVYTLPPSREQMTKNQVKLTCLVKGFYPSDIAVEWESNGQPENNYKTTPPVLDSDGSFFLYSKLTVDKSRWQQGNVFSCSVMHEALHNHYTQKSLSLSPGK

SEQ ID NO: 1034 - protein, 447 aa, synthetic construct; identical to SEQ ID NO: 988
  source 1..447: note = XENP40372 Chain 1-38E2[B7H3]_H2_Fab-IgG1_pI(-)_Isosteric_A_L368D/K370S

SEQ ID NO: 1035 - protein, 480 aa, synthetic construct
  source 1..480: note = XENP40372 Chain 2-1D2B4[NKG2D]_H1L1_scFv(GKPGS)4-Fc(216)_IgG1_C220S/S364K/E 357Q
EVQLLESGGGLVQPGGSLRLSCAASGFTFSSFGMSWVRQAPGKGLEWVSTISGSGSTTYYADSVKGRFTISRDNSKNTLYLQMNSLRAEDTAVYYCAKGVFSEWHYYFDYWGQGTLVTVSSGKPGSGKPGSGKPGSGKPGSDIQMTQSPSSLSASVGDRVTITCRASQSISSYLNWYQQKPGKAPKLLIYAASSLQSGVPSRFSGSGSGTDFTLTISSLQPEDFATYYCQQSYSTPYTFGQGTKLEIKEPKSSDKTHTCPPCPAPELLGGPSVFLFPPKPKDTLMISRTPEVTCVVVDVSHEDPEVKFNWYVDGVEVHNAKTKPREEQYNSTYRVVSVLTVLHQDWLNGKEYKCKVSNKALPAPIEKTISKAKGQPREPQVYTLPPSREQMTKNQVKLTCLVKGFYPSDIAVEWESNGQPENNYKTTPPVLDSDGSFFLYSKLTVDKSRWQQGNVFSCSVMHEALHNHYTQKSLSLSPGK

SEQ ID NO: 1036 - protein, 447 aa, synthetic construct; identical to SEQ ID NO: 988
  source 1..447: note = XENP40375 Chain 1-38E2[B7H3]_H2_Fab-IgG1_pI(-)_Isosteric_A_L368D/K370S

SEQ ID NO: 1037 - protein, 480 aa, synthetic construct
  source 1..480: note = XENP40375 Chain 2-1D7B4[NKG2D]_H1L1_scFv(GKPGS)4-Fc(216)_IgG1_C220S/S364K/E 357Q
EVQLLESGGGLVQPGGSLRLSCAASGFTFSSYAMSWVRQAPGKGLEWVSSISASGGSTYYADSVKGRFTISRDNSKNTLYLQMNSLRAEDTAVYYCAKGIFSIYFFYFDYWGQGTLVTVSSGKPGSGKPGSGKPGSGKPGSDIQMTQSPSSLSASVGDRVTITCRASQSISSYLNWYQQKPGKAPKLLIYAASSLQSGVPSRFSGSGSGTDFTLTISSLQPEDFATYYCQQSYSTPYTFGQGTKLEIKEPKSSDKTHTCPPCPAPELLGGPSVFLFPPKPKDTLMISRTPEVTCVVVDVSHEDPEVKFNWYVDGVEVHNAKTKPREEQYNSTYRVVSVLTVLHQDWLNGKEYKCKVSNKALPAPIEKTISKAKGQPREPQVYTLPPSREQMTKNQVKLTCLVKGFYPSDIAVEWESNGQPENNYKTTPPVLDSDGSFFLYSKLTVDKSRWQQGNVFSCSVMHEALHNHYTQKSLSLSPGK

SEQ ID NO: 1038 - protein, 446 aa, synthetic construct
  source 1..446: note = XENP40376 Chain 1-38E2[B7H3]_H2_Fab-IgG1_pI(-)_Isosteric_A_PVA_/S267K/L368D /K370S
EVQLLESGGGLVQPGGSLRLSCAVSGFSLSSYGVIWVRQAPGKGLEYVSWVSSGGSTNYASSVKGRFTISRDTSKNTVYLQMNSLRAEDTAVYFCARGATNSGTDIWGPGTLVTVSSASTKGPSVFPLAPSSKSTSGGTAALGCLVKDYFPEPVTVSWNSGALTSGVHTFPAVLQSSGLYSLSSVVTVPSSSLGTQTYICNVNHKPSDTKVDKKVEPKSCDKTHTCPPCPAPPVAGPSVFLFPPKPKDTLMISRTPEVTCVVVDVKHEDPEVKFNWYVDGVEVHNAKTKPREEEYNSTYRVVSVLTVLHQDWLNGKEYKCKVSNKALPAPIEKTISKAKGQPREPQVYTLPPSREEMTKNQVSLTCDVSGFYPSDIAVEWESDGQPENNYKTTPPVLDSDGSFFLYSKLTVDKSRWEQGDVFSCSVMHEALHNHYTQKSLSLSPGK

SEQ ID NO: 1039 - protein, 479 aa, synthetic construct
  source 1..479: note = XENP40376 Chain 2-1D7B4[NKG2D]_H1L1_scFv(GKPGS)4-Fc(216)_IgG1_C220S/PVA_/S2 67K/S364K/E357Q
EVQLLESGGGLVQPGGSLRLSCAASGFTFSSYAMSWVRQAPGKGLEWVSSISASGGSTYYADSVKGRFTISRDNSKNTLYLQMNSLRAEDTAVYYCAKGIFSIYFFYFDYWGQGTLVTVSSGKPGSGKPGSGKPGSGKPGSDIQMTQSPSSLSASVGDRVTITCRASQSISSYLNWYQQKPGKAPKLLIYAASSLQSGVPSRFSGSGSGTDFTLTISSLQPEDFATYYCQQSYSTPYTFGQGTKLEIKEPKSSDKTHTCPPCPAPPVAGPSVFLFPPKPKDTLMISRTPEVTCVVVDVKHEDPEVKFNWYVDGVEVHNAKTKPREEQYNSTYRVVSVLTVLHQDWLNGKEYKCKVSNKALPAPIEKTISKAKGQPREPQVYTLPPSREQMTKNQVKLTCLVKGFYPSDIAVEWESNGQPENNYKTTPPVLDSDGSFFLYSKLTVDKSRWQQGNVFSCSVMHEALHNHYTQKSLSLSPGK

SEQ ID NO: 1040 - protein, 447 aa, synthetic construct; identical to SEQ ID NO: 4
  source 1..447: note = XENP40377 Chain 1-38E2[B7H3]_H2_Fab-IgG1_pI(-)_Isosteric_A_S239D/I332E/L368 D/K370S

SEQ ID NO: 1041 - protein, 480 aa, synthetic construct; identical to SEQ ID NO: 5
  source 1..480: note = XENP40377 Chain 2-1D7B4[NKG2D]_H1L1_scFv(GKPGS)4-Fc(216)_IgG1_C220S/S239D/I 332E/S364K/E357Q

SEQ ID NO: 1042 - protein, 447 aa, synthetic construct; identical to SEQ ID NO: 988
  source 1..447: note = XENP40381 Chain 1-38E2[B7H3]_H2_Fab-IgG1_pI(-)_Isosteric_A_L368D/K370S

SEQ ID NO: 1043 - protein, 480 aa, synthetic construct
  source 1..480: note = XENP40381 Chain 2-ADI27744_A44[NKG2D]_H0L0_scFv(GKPGS)4-Fc(216)_IgG1_C220S/ S364K/E357Q
EVQLLESGGGLVQPGGSLRLSCAASGFTFSSYAMSWVRQAPGKGLEWVSAISGSGGSTYYADSVKGRFTISRDNSKNTLYLQMNSLRAEDTAVYYCAKDGGYYDSGAGDYWGQGTLVTVSSGKPGSGKPGSGKPGSGKPGSDIQMTQSPSSVSASVGDRVTITCRASQGIDSWLAWYQQKPGKAPKLLIYAASSLQSGVPSRFSGSGSGTDFTLTISSLQPEDFATYYCQQGVSYPRTFGGGTKVEIKEPKSSDKTHTCPPCPAPELLGGPSVFLFPPKPKDTLMISRTPEVTCVVVDVSHEDPEVKFNWYVDGVEVHNAKTKPREEQYNSTYRVVSVLTVLHQDWLNGKEYKCKVSNKALPAPIEKTISKAKGQPREPQVYTLPPSREQMTKNQVKLTCLVKGFYPSDIAVEWESNGQPENNYKTTPPVLDSDGSFFLYSKLTVDKSRWQQGNVFSCSVMHEALHNHYTQKSLSLSPGK

SEQ ID NO: 1044 - protein, 447 aa, synthetic construct; identical to SEQ ID NO: 988
  source 1..447: note = XENP40457 Chain 1-38E2[B7H3]_H2_Fab-IgG1_pI(-)_Isosteric_A_L368D/K370S

SEQ ID NO: 1045 - protein, 481 aa, synthetic construct
  source 1..481: note = XENP40457 Chain 2-ADI27749_A49[NKG2D]_H0L0_scFv(GKPGS)4-Fc(216)_IgG1_C220S/ S364K/E357Q
EVQLVESGGGLVKPGGSLRLSCAASGFTFSSYSMNWVRQAPGKGLEWVSSISSSSSYIYYADSVKGRFTISRDNAKNSLYLQMNSLRAEDTAVYYCARGAPMGAAAGWFDPWGQGTLVTVSSGKPGSGKPGSGKPGSGKPGSDIQMTQSPSSVSASVGDRVTITCRASQGISSWLAWYQQKPGKAPKLLIYAASSLQSGVPSRFSGSGSGTDFTLTISSLQPEDFATYYCQQGVSFPRTFGGGTKVEIKEPKSSDKTHTCPPCPAPELLGGPSVFLFPPKPKDTLMISRTPEVTCVVVDVSHEDPEVKFNWYVDGVEVHNAKTKPREEQYNSTYRVVSVLTVLHQDWLNGKEYKCKVSNKALPAPIEKTISKAKGQPREPQVYTLPPSREQMTKNQVKLTCLVKGFYPSDIAVEWESNGQPENNYKTTPPVLDSDGSFFLYSKLTVDKSRWQQGNVFSCSVMHEALHNHYTQKSLSLSPGK

SEQ ID NO: 1046 - protein, 447 aa, synthetic construct; identical to SEQ ID NO: 988
  source 1..447: note = XENP40552 Chain 1-38E2[B7H3]_H2_Fab-IgG1_pI(-)_Isosteric_A_L368D/K370S

SEQ ID NO: 1047 - protein, 709 aa, synthetic construct
  source 1..709: note = XENP40552 Chain 2-38E2[B7H3]_H2_L1.1_Fab-IgG1_S364K/E357Q/K447del_(G4S)3_AD I27744_A44[NKG2D]_H0_L0_scFv(GKPGS)4
EVQLLESGGGLVQPGGSLRLSCAVSGFSLSSYGVIWVRQAPGKGLEYVSWVSSGGSTNYASSVKGRFTISRDTSKNTVYLQMNSLRAEDTAVYFCARGATNSGTDIWGPGTLVTVSSASTKGPSVFPLAPSSKSTSGGTAALGCLVKDYFPEPVTVSWNSGALTSGVHTFPAVLQSSGLYSLSSVVTVPSSSLGTQTYICNVNHKPSNTKVDKKVEPKSCDKTHTCPPCPAPELLGGPSVFLFPPKPKDTLMISRTPEVTCVVVDVSHEDPEVKFNWYVDGVEVHNAKTKPREEQYNSTYRVVSVLTVLHQDWLNGKEYKCKVSNKALPAPIEKTISKAKGQPREPQVYTLPPSREQMTKNQVKLTCLVKGFYPSDIAVEWESNGQPENNYKTTPPVLDSDGSFFLYSKLTVDKSRWQQGNVFSCSVMHEALHNHYTQKSLSLSPGGGGGSGGGGSGGGGSEVQLLESGGGLVQPGGSLRLSCAASGFTFSSYAMSWVRQAPGKGLEWVSAISGSGGSTYYADSVKGRFTISRDNSKNTLYLQMNSLRAEDTAVYYCAKDGGYYDSGAGDYWGQGTLVTVSSGKPGSGKPGSGKPGSGKPGSDIQMTQSPSSVSASVGDRVTITCRASQGIDSWLAWYQQKPGKAPKLLIYAASSLQSGVPSRFSGSGSGTDFTLTISSLQPEDFATYYCQQGVSYPRTFGGGTKVEIK

SEQ ID NO: 1048 - protein, 447 aa, synthetic construct; identical to SEQ ID NO: 988
  source 1..447: note = XENP40555 Chain 1-38E2[B7H3]_H2_Fab-IgG1_pI(-)_Isosteric_A_L368D/K370S

SEQ ID NO: 1049 - protein, 709 aa, synthetic construct
  source 1..709: note = XENP40555 Chain 2-38E2[B7H3]_H2_Fab-IgG1_S364K/E357Q/K447del_(G4S)3_1D2B4[N KG2D]_H1_L1_scFv(GKPGS)4
EVQLLESGGGLVQPGGSLRLSCAVSGFSLSSYGVIWVRQAPGKGLEYVSWVSSGGSTNYASSVKGRFTISRDTSKNTVYLQMNSLRAEDTAVYFCARGATNSGTDIWGPGTLVTVSSASTKGPSVFPLAPSSKSTSGGTAALGCLVKDYFPEPVTVSWNSGALTSGVHTFPAVLQSSGLYSLSSVVTVPSSSLGTQTYICNVNHKPSNTKVDKKVEPKSCDKTHTCPPCPAPELLGGPSVFLFPPKPKDTLMISRTPEVTCVVVDVSHEDPEVKFNWYVDGVEVHNAKTKPREEQYNSTYRVVSVLTVLHQDWLNGKEYKCKVSNKALPAPIEKTISKAKGQPREPQVYTLPPSREQMTKNQVKLTCLVKGFYPSDIAVEWESNGQPENNYKTTPPVLDSDGSFFLYSKLTVDKSRWQQGNVFSCSVMHEALHNHYTQKSLSLSPGGGGGSGGGGSGGGGSEVQLLESGGGLVQPGGSLRLSCAASGFTFSSFGMSWVRQAPGKGLEWVSTISGSGSTTYYADSVKGRFTISRDNSKNTLYLQMNSLRAEDTAVYYCAKGVFSEWHYYFDYWGQGTLVTVSSGKPGSGKPGSGKPGSGKPGSDIQMTQSPSSLSASVGDRVTITCRASQSISSYLNWYQQKPGKAPKLLIYAASSLQSGVPSRFSGSGSGTDFTLTISSLQPEDFATYYCQQSYSTPYTFGQGTKLEIK

SEQ ID NO: 1050 - protein, 446 aa, synthetic construct; identical to SEQ ID NO: 1038
  source 1..446: note = XENP40557 Chain 1-38E2[B7H3]_H2_Fab-IgG1_pI(-)_Isosteric_A_PVA_/S267K/L368D /K370S

SEQ ID NO: 1051 - protein, 708 aa, synthetic construct
  source 1..708: note = XENP40557 Chain 2-38E2[B7H3]_H2_Fab-IgG1_PVA_/S267K/S364K/E357Q/K447del_(G4 S)3_1D7B4[NKG2D]_H1_L1_scFv(GKPGS)4
EVQLLESGGGLVQPGGSLRLSCAVSGFSLSSYGVIWVRQAPGKGLEYVSWVSSGGSTNYASSVKGRFTISRDTSKNTVYLQMNSLRAEDTAVYFCARGATNSGTDIWGPGTLVTVSSASTKGPSVFPLAPSSKSTSGGTAALGCLVKDYFPEPVTVSWNSGALTSGVHTFPAVLQSSGLYSLSSVVTVPSSSLGTQTYICNVNHKPSNTKVDKKVEPKSCDKTHTCPPCPAPPVAGPSVFLFPPKPKDTLMISRTPEVTCVVVDVKHEDPEVKFNWYVDGVEVHNAKTKPREEQYNSTYRVVSVLTVLHQDWLNGKEYKCKVSNKALPAPIEKTISKAKGQPREPQVYTLPPSREQMTKNQVKLTCLVKGFYPSDIAVEWESNGQPENNYKTTPPVLDSDGSFFLYSKLTVDKSRWQQGNVFSCSVMHEALHNHYTQKSLSLSPGGGGGSGGGGSGGGGSEVQLLESGGGLVQPGGSLRLSCAASGFTFSSYAMSWVRQAPGKGLEWVSSISASGGSTYYADSVKGRFTISRDNSKNTLYLQMNSLRAEDTAVYYCAKGIFSIYFFYFDYWGQGTLVTVSSGKPGSGKPGSGKPGSGKPGSDIQMTQSPSSLSASVGDRVTITCRASQSISSYLNWYQQKPGKAPKLLIYAASSLQSGVPSRFSGSGSGTDFTLTISSLQPEDFATYYCQQSYSTPYTFGQGTKLEIK

SEQ ID NO: 1052 - protein, 447 aa, synthetic construct; identical to SEQ ID NO: 988
  source 1..447: note = XENP40558 Chain 1-38E2[B7H3]_H2_Fab-IgG1_pI(-)_Isosteric_A_L368D/K370S

SEQ ID NO: 1053 - protein, 709 aa, synthetic construct
  source 1..709: note = XENP40558 Chain 2-38E2[B7H3]_H2_Fab-IgG1_S364K/E357Q/K447del_(G4S)3_1D7B4[N KG2D]_H1_L1_scFv(GKPGS)4
EVQLLESGGGLVQPGGSLRLSCAVSGFSLSSYGVIWVRQAPGKGLEYVSWVSSGGSTNYASSVKGRFTISRDTSKNTVYLQMNSLRAEDTAVYFCARGATNSGTDIWGPGTLVTVSSASTKGPSVFPLAPSSKSTSGGTAALGCLVKDYFPEPVTVSWNSGALTSGVHTFPAVLQSSGLYSLSSVVTVPSSSLGTQTYICNVNHKPSNTKVDKKVEPKSCDKTHTCPPCPAPELLGGPSVFLFPPKPKDTLMISRTPEVTCVVVDVSHEDPEVKFNWYVDGVEVHNAKTKPREEQYNSTYRVVSVLTVLHQDWLNGKEYKCKVSNKALPAPIEKTISKAKGQPREPQVYTLPPSREQMTKNQVKLTCLVKGFYPSDIAVEWESNGQPENNYKTTPPVLDSDGSFFLYSKLTVDKSRWQQGNVFSCSVMHEALHNHYTQKSLSLSPGGGGGSGGGGSGGGGSEVQLLESGGGLVQPGGSLRLSCAASGFTFSSYAMSWVRQAPGKGLEWVSSISASGGSTYYADSVKGRFTISRDNSKNTLYLQMNSLRAEDTAVYYCAKGIFSIYFFYFDYWGQGTLVTVSSGKPGSGKPGSGKPGSGKPGSDIQMTQSPSSLSASVGDRVTITCRASQSISSYLNWYQQKPGKAPKLLIYAASSLQSGVPSRFSGSGSGTDFTLTISSLQPEDFATYYCQQSYSTPYTFGQGTKLEIK

SEQ ID NO: 1054 - protein, 447 aa, synthetic construct; identical to SEQ ID NO: 4
  source 1..447: note = XENP40559 Chain 1-38E2[B7H3]_H2_Fab-IgG1_pI(-)_Isosteric_A_S239D/I332E/L368 D/K370S

SEQ ID NO: 1055 - protein, 709 aa, synthetic construct
  source 1..709: note = XENP40559 Chain 2-38E2[B7H3]_H2_Fab-IgG1_S239D/I332E/S364K/E357Q/K447del_(G 4S)3_1D7B4[NKG2D]_H1_L1_scFv(GKPGS)4
EVQLLESGGGLVQPGGSLRLSCAVSGFSLSSYGVIWVRQAPGKGLEYVSWVSSGGSTNYASSVKGRFTISRDTSKNTVYLQMNSLRAEDTAVYFCARGATNSGTDIWGPGTLVTVSSASTKGPSVFPLAPSSKSTSGGTAALGCLVKDYFPEPVTVSWNSGALTSGVHTFPAVLQSSGLYSLSSVVTVPSSSLGTQTYICNVNHKPSNTKVDKKVEPKSCDKTHTCPPCPAPELLGGPDVFLFPPKPKDTLMISRTPEVTCVVVDVSHEDPEVKFNWYVDGVEVHNAKTKPREEQYNSTYRVVSVLTVLHQDWLNGKEYKCKVSNKALPAPEEKTISKAKGQPREPQVYTLPPSREQMTKNQVKLTCLVKGFYPSDIAVEWESNGQPENNYKTTPPVLDSDGSFFLYSKLTVDKSRWQQGNVFSCSVMHEALHNHYTQKSLSLSPGGGGGSGGGGSGGGGSEVQLLESGGGLVQPGGSLRLSCAASGFTFSSYAMSWVRQAPGKGLEWVSSISASGGSTYYADSVKGRFTISRDNSKNTLYLQMNSLRAEDTAVYYCAKGIFSIYFFYFDYWGQGTLVTVSSGKPGSGKPGSGKPGSGKPGSDIQMTQSPSSLSASVGDRVTITCRASQSISSYLNWYQQKPGKAPKLLIYAASSLQSGVPSRFSGSGSGTDFTLTISSLQPEDFATYYCQQSYSTPYTFGQGTKLEIK

SEQ ID NO: 1056 - protein, 447 aa, synthetic construct; identical to SEQ ID NO: 988
  source 1..447: note = XENP40584 Chain 1-38E2[B7H3]_H2_Fab-IgG1_pI(-)_Isosteric_A_L368D/K370S

SEQ ID NO: 1057 - protein, 714 aa, synthetic construct
  source 1..714: note = XENP40584 Chain 2-38E2[B7H3]_H2_Fab_ADI27744_A44[NKG2D]_H0_L0_scFv(GKPGS)4_ (G4S)2-Fc(222)_IgG1_S364K/E357Q
EVQLLESGGGLVQPGGSLRLSCAVSGFSLSSYGVIWVRQAPGKGLEYVSWVSSGGSTNYASSVKGRFTISRDTSKNTVYLQMNSLRAEDTAVYFCARGATNSGTDIWGPGTLVTVSSASTKGPSVFPLAPSSKSTSGGTAALGCLVKDYFPEPVTVSWNSGALTSGVHTFPAVLQSSGLYSLSSVVTVPSSSLGTQTYICNVNHKPSNTKVDKKVEPKSCGGGGSGGGGSEVQLLESGGGLVQPGGSLRLSCAASGFTFSSYAMSWVRQAPGKGLEWVSAISGSGGSTYYADSVKGRFTISRDNSKNTLYLQMNSLRAEDTAVYYCAKDGGYYDSGAGDYWGQGTLVTVSSGKPGSGKPGSGKPGSGKPGSDIQMTQSPSSVSASVGDRVTITCRASQGIDSWLAWYQQKPGKAPKLLIYAASSLQSGVPSRFSGSGSGTDFTLTISSLQPEDFATYYCQQGVSYPRTFGGGTKVEIKGGGGSGGGGSKTHTCPPCPAPELLGGPSVFLFPPKPKDTLMISRTPEVTCVVVDVSHEDPEVKFNWYVDGVEVHNAKTKPREEQYNSTYRVVSVLTVLHQDWLNGKEYKCKVSNKALPAPIEKTISKAKGQPREPQVYTLPPSREQMTKNQVKLTCLVKGFYPSDIAVEWESNGQPENNYKTTPPVLDSDGSFFLYSKLTVDKSRWQQGNVFSCSVMHEALHNHYTQKSLSLSPGK

SEQ ID NO: 1058 - protein, 447 aa, synthetic construct; identical to SEQ ID NO: 988
  source 1..447: note = XENP40587 Chain 1-38E2[B7H3]_H2_Fab-IgG1_pI(-)_Isosteric_A_L368D/K370S

SEQ ID NO: 1059 - protein, 714 aa, synthetic construct
  source 1..714: note = XENP40587 Chain 2-38E2[B7H3]_H2_Fab_1D2B4[NKG2D]_H1_L1_scFv(GKPGS)4_(G4S)2- Fc(222)_IgG1_S364K/E357Q
EVQLLESGGGLVQPGGSLRLSCAVSGFSLSSYGVIWVRQAPGKGLEYVSWVSSGGSTNYASSVKGRFTISRDTSKNTVYLQMNSLRAEDTAVYFCARGATNSGTDIWGPGTLVTVSSASTKGPSVFPLAPSSKSTSGGTAALGCLVKDYFPEPVTVSWNSGALTSGVHTFPAVLQSSGLYSLSSVVTVPSSSLGTQTYICNVNHKPSNTKVDKKVEPKSCGGGGSGGGGSEVQLLESGGGLVQPGGSLRLSCAASGFTFSSFGMSWVRQAPGKGLEWVSTISGSGSTTYYADSVKGRFTISRDNSKNTLYLQMNSLRAEDTAVYYCAKGVFSEWHYYFDYWGQGTLVTVSSGKPGSGKPGSGKPGSGKPGSDIQMTQSPSSLSASVGDRVTITCRASQSISSYLNWYQQKPGKAPKLLIYAASSLQSGVPSRFSGSGSGTDFTLTISSLQPEDFATYYCQQSYSTPYTFGQGTKLEIKGGGGSGGGGSKTHTCPPCPAPELLGGPSVFLFPPKPKDTLMISRTPEVTCVVVDVSHEDPEVKFNWYVDGVEVHNAKTKPREEQYNSTYRVVSVLTVLHQDWLNGKEYKCKVSNKALPAPIEKTISKAKGQPREPQVYTLPPSREQMTKNQVKLTCLVKGFYPSDIAVEWESNGQPENNYKTTPPVLDSDGSFFLYSKLTVDKSRWQQGNVFSCSVMHEALHNHYTQKSLSLSPGK

SEQ ID NO: 1060 - protein, 30 aa, synthetic construct
  source 1..30: note = 1D7B4 VH HFR1
EVQLLESGGGLVQPGGSLRLSCAASGFTFS

SEQ ID NO: 1061 - protein, 14 aa, synthetic construct
  source 1..14: note = 1D7B4 VH HFR2
WVRQAPGKGLEWVS

SEQ ID NO: 1062 - protein, 17 aa, synthetic construct
  source 1..17: note = 1D7B4 VH HCDR2
SISASGGSTYYADSVKG

SEQ ID NO: 1063 - protein, 32 aa, synthetic construct
  source 1..32: note = 1D7B4 VH HFR3
RFTISRDNSKNTLYLQMNSLRAEDTAVYYCAK

SEQ ID NO: 1064 - protein, 12 aa, synthetic construct
  source 1..12: note = 1D7B4 VH HCDR3
  VARIANT 2: note = I, W, K, A, or H
  VARIANT 4: note = S or A
  VARIANT 5: note = I, W, A, Q, E, H, or S
  VARIANT 6: note = Y, H, A, S, E, Q, or L
  VARIANT 7: note = F, H, A, S, E, Q, or L
  VARIANT 8: note = F, H, or E
  VARIANT 10: note = F or H
GXFXXXXXYXDY

SEQ ID NO: 1065 - protein, 11 aa, synthetic construct
  source 1..11: note = 1D7B4 VH HFR4
WGQGTLVTVSS

SEQ ID NO: 1066 - protein, 23 aa, synthetic construct
  source 1..23: note = 1A7 VL LFR1
DIQMTQSPSSLSASVGDRVTITC

SEQ ID NO: 1067 - protein, 11 aa, synthetic construct
  source 1..11: note = 1A7 VL LCDR1
RASQSISSYLN

SEQ ID NO: 1068 - protein, 15 aa, synthetic construct
  source 1..15: note = 1A7 VL LFR2
WYQQKPGKAPKLLIY

SEQ ID NO: 1069 - protein, 7 aa, synthetic construct
  source 1..7: note = 1A7 VL LCDR2
AASSLQS

SEQ ID NO: 1070 - protein, 32 aa, synthetic construct; identical to SEQ ID NO: 381
  source 1..32: note = 1A7 VL LFR3

SEQ ID NO: 1071 - protein, 9 aa, synthetic construct
  source 1..9: note = 1A7 VL LCDR3
QQSYSTPYT

SEQ ID NO: 1072 - protein, 10 aa, synthetic construct
  source 1..10: note = 1A7 VL LFR4
FGQGTKLEIK

SEQ ID NO: 1073 - protein, 216 aa, Homo sapiens
  source 1..216: note = Human NKG2D Full length Sequence
MGWIRGRRSRHSWEMSEFHNYNLDLKKSDFSTRWQKQRCPVVKSKCRENASPFFFCCFIAVAMGIRFIIMVAIWSAVFLNSLFNQEVQIPLTESYCGPCPKNWICYKNNCYQFFDESKNWYESQASCMSQNASLLKVYSKEDQDLLKLVKSYHWMGLVHIPTNGSWQWEDGSILSPNLLTIIEMQKGDCALYASSFKGYIENCSTPNTYICMQRTV

SEQ ID NO: 1074 - protein, 144 aa, Homo sapiens
  source 1..144: note = Human NKG2D Extracellular domain
IWSAVFLNSLFNQEVQIPLTESYCGPCPKNWICYKNNCYQFFDESKNWYESQASCMSQNASLLKVYSKEDQDLLKLVKSYHWMGLVHIPTNGSWQWEDGSILSPNLLTIIEMQKGDCALYASSFKGYIENCSTPNTYICMQRTV

SEQ ID NO: 1075 - protein, 21 aa, Homo sapiens
  source 1..21: note = Human NKG2D Transmembrane domain
PFFFCCFIAVAMGIRFIIMVT

SEQ ID NO: 1076 - protein, 51 aa, Homo sapiens
  source 1..51: note = Human NKG2D Cytoplasmic domain
MGWIRGRRSRHSWEMSEFHNYNLDLKKSDFSTRWQKQRCPVVKSKCRENAS

SEQ ID NO: 1077 - protein, 350 aa, synthetic construct
  source 1..350: note = XENP24306 Chain 1- human_IL15_D30N/E64Q/N65D_(GGGGS)1_IgG1_pI(-)_Isosteric_A_C 220S/PVA_/S267K/L368D/K370S/M428L/N434S
NWVNVISDLKKIEDLIQSMHIDATLYTESNVHPSCKVTAMKCFLLELQVISLESGDASIHDTVQDLIILANNSLSSNGNVTESGCKECEELEEKNIKEFLQSFVHIVQMFINTSGGGGSEPKSSDKTHTCPPCPAPPVAGPSVFLFPPKPKDTLMISRTPEVTCVVVDVKHEDPEVKFNWYVDGVEVHNAKTKPREEEYNSTYRVVSVLTVLHQDWLNGKEYKCKVSNKALPAPIEKTISKAKGQPREPQVYTLPPSREEMTKNQVSLTCDVSGFYPSDIAVEWESDGQPENNYKTTPPVLDSDGSFFLYSKLTVDKSRWEQGDVFSCSVLHEALHSHYTQKSLSLSPGK

SEQ ID NO: 1078 - protein, 301 aa, synthetic construct
  source 1..301: note = XENP24306 human_IL15Ra(Sushi)_(GGGGS)1_ Fc(216)_IgG1_C220S/PVA_/S267K/S364K/E357Q/M428L/N434S
ITCPPPMSVEHADIWVKSYSLYSRERYICNSGFKRKAGTSSLTECVLNKATNVAHWTTPSLKCIRGGGGSEPKSSDKTHTCPPCPAPPVAGPSVFLFPPKPKDTLMISRTPEVTCVVVDVKHEDPEVKFNWYVDGVEVHNAKTKPREEQYNSTYRVVSVLTVLHQDWLNGKEYKCKVSNKALPAPIEKTISKAKGQPREPQVYTLPPSREQMTKNQVKLTCLVKGFYPSDIAVEWESNGQPENNYKTTPPVLDSDGSFFLYSKLTVDKSRWQQGNVFSCSVLHEALHSHYTQKSLSLSPGK

SEQ ID NO: 1079 - protein, 162 aa, Homo sapiens
  source 1..162: note = Human IL-15 precursor sequence
MRISKPHLRSISIQCYLCLLLNSHFLTEAGIHVFILGCFSAGLPKTEANWVNVISDLKKIEDLIQSMHIDATLYTESDVHPSCKVTAMKCFLLELQVISLESGDASIHDTVENLIILANNSLSSNGNVTESGCKECEELEEKNIKEFLQSFVHIVQMFINTS

SEQ ID NO: 1080 - protein, 114 aa, Homo sapiens
  source 1..114: note = Human IL-15 mature form sequence
NWVNVISDLKKIEDLIQSMHIDATLYTESDVHPSCKVTAMKCFLLELQVISLESGDASIHDTVENLIILANNSLSSNGNVTESGCKECEELEEKNIKEFLQSFVHIVQMFINTS

SEQ ID NO: 1081 - protein, 267 aa, Homo sapiens
  source 1..267: note = Human IL-15Ralpha sequence
MAPRRARGCRTLGLPALLLLLLLRPPATRGITCPPPMSVEHADIWVKSYSLYSRERYICNSGFKRKAGTSSLTECVLNKATNVAHWTTPSLKCIRDPALVHQRPAPPSTVTTAGVTPQPESLSPSGKEPAASSPSSNNTAATTAAIVPGSQLMPSKSPSTGTTEISSHESSHGTPSQTTAKNWELTASASHQPPGVYPQGHSDTTVAISTSTVLLCGLSAVSLLACYLKSRQTPPLASVEMEAMEALPVTWGTSSRDEDLENCSHHL

SEQ ID NO: 1082 - protein, 175 aa, Homo sapiens
  source 1..175: note = Human IL-15Ralpha, extracellular domain
ITCPPPMSVEHADIWVKSYSLYSRERYICNSGFKRKAGTSSLTECVLNKATNVAHWTTPSLKCIRDPALVHQRPAPPSTVTTAGVTPQPESLSPSGKEPAASSPSSNNTAATTAAIVPGSQLMPSKSPSTGTTEISSHESSHGTPSQTTAKNWELTASASHQPPGVYPQGHSDTT

SEQ ID NO: 1083 - protein, 65 aa, Homo sapiens
  source 1..65: note = Human IL-15Ralpha, sushi domain
ITCPPPMSVEHADIWVKSYSLYSRERYICNSGFKRKAGTSSLTECVLNKATNVAHWTTPSLKCIR

SEQ ID NO: 1084 - protein, 551 aa, Homo sapiens
  source 1..551: note = Human IL-15Rbeta sequence
MAAPALSWRLPLLILLLPLATSWASAAVNGTSQFTCFYNSRANISCVWSQDGALQDTSCQVHAWPDRRRWNQTCELLPVSQASWACNLILGAPDSQKLTTVDIVTLRVLCREGVRWRVMAIQDFKPFENLRLMAPISLQVVHVETHRCNISWEISQASHYFERHLEFEARTLSPGHTWEEAPLLTLKQKQEWICLETLTPDTQYEFQVRVKPLQGEFTTWSPWSQPLAFRTKPAALGKDTIPWLGHLLVGLSGAFGFIILVYLLINCRNTGPWLKKVLKCNTPDPSKFFSQLSSEHGGDVQKWLSSPFPSSSFSPGGLAPEISPLEVLERDKVTQLLLQQDKVPEPASLSSNHSLTSCFTNQGYFFFHLPDALEIEACQVYFTYDPYSEEDPDEGVAGAPTGSSPQPLQPLSGEDDAYCTFPSRDDLLLFSPSLLGGPSPPSTAPGGSGAGEERMPPSLQERVPRDWDPQPLGPPTPGVPDLVDFQPPPELVLREAGEEVPDAGPREGVSFPWSRPPGQGEFRALNARLPLNTDAYLSLQELQGQDPTHLV

SEQ ID NO: 1085 - protein, 214 aa, Homo sapiens
  source 1..214: note = Human IL-15Rbeta, extracellular domain
AVNGTSQFTCFYNSRANISCVWSQDGALQDTSCQVHAWPDRRRWNQTCELLPVSQASWACNLILGAPDSQKLTTVDIVTLRVLCREGVRWRVMAIQDFKPFENLRLMAPISLQVVHVETHRCNISWEISQASHYFERHLEFEARTLSPGHTWEEAPLLTLKQKQEWICLETLTPDTQYEFQVRVKPLQGEFTTWSPWSQPLAFRTKPAALGKDT

SEQ ID NO: 1086 - protein, 369 aa, Homo sapiens
  source 1..369: note = Human common gamma chain sequence
MLKPSLPFTSLLFLQLPLLGVGLNTTILTPNGNEDTTADFFLTTMPTDSLSVSTLPLPEVQCFVFNVEYMNCTWNSSSEPQPTNLTLHYWYKNSDNDKVQKCSHYLFSEEITSGCQLQKKEIHLYQTFVVQLQDPREPRRQATQMLKLQNLVIPWAPENLTLHKLSESQLELNWNNRFLNHCLEHLVQYRTDWDHSWTEQSVDYRHKFSLPSVDGQKRYTFRVRSRFNPLCGSAQHWSEWSHPIHWGSNTSKENPFLFALEAVVISVGSMGLIISLLCVYFWLERTMPRIPTLKNLEDLVTEYHGNFSAWSGVSKGLAESLQPDYSERLCLVSEIPPKGGALGEGPGASPCNQHSPYWAPPCYTLKPET

SEQ ID NO: 1087 - protein, 240 aa, Homo sapiens
  source 1..240: note = Human common gamma chain, extracellular domain
LNTTILTPNGNEDTTADFFLTTMPTDSLSVSTLPLPEVQCFVFNVEYMNCTWNSSSEPQPTNLTLHYWYKNSDNDKVQKCSHYLFSEEITSGCQLQKKEIHLYQTFVVQLQDPREPRRQATQMLKLQNLVIPWAPENLTLHKLSESQLELNWNNRFLNHCLEHLVQYRTDWDHSWTEQSVDYRHKFSLPSVDGQKRYTFRVRSRFNPLCGSAQHWSEWSHPIHWGSNTSKENPFLFALEA

SEQ ID NO: 1088 - protein, 219 aa, Homo sapiens
  source 1..219: note = Human IL-12 subunit alpha (IL-12p35) precursor sequence
MCPARSLLLVATLVLLDHLSLARNLPVATPDPGMFPCLHHSQNLLRAVSNMLQKARQTLEFYPCTSEEIDHEDITKDKTSTVEACLPLELTKNESCLNSRETSFITNGSCLASRKTSFMMALCLSSIYEDLKMYQVEFKTMNAKLLMDPKRQIFLDQNMLAVIDELMQALNFNSETVPQKSSLEEPDFYKTKIKLCILLHAFRIRAVTIDRVMSYLNAS

SEQ ID NO: 1089 - protein, 197 aa, Homo sapiens
  source 1..197: note = Human IL-12 subunit alpha (IL-12p35) mature form sequence
RNLPVATPDPGMFPCLHHSQNLLRAVSNMLQKARQTLEFYPCTSEEIDHEDITKDKTSTVEACLPLELTKNESCLNSRETSFITNGSCLASRKTSFMMALCLSSIYEDLKMYQVEFKTMNAKLLMDPKRQIFLDQNMLAVIDELMQALNFNSETVPQKSSLEEPDFYKTKIKLCILLHAFRIRAVTIDRVMSYLNAS

SEQ ID NO: 1090 - protein, 328 aa, Homo sapiens
  source 1..328: note = Human IL-12 subunit beta (IL-12p40) precursor sequence
MCHQQLVISWFSLVFLASPLVAIWELKKDVYVVELDWYPDAPGEMVVLTCDTPEEDGITWTLDQSSEVLGSGKTLTIQVKEFGDAGQYTCHKGGEVLSHSLLLLHKKEDGIWSTDILKDQKEPKNKTFLRCEAKNYSGRFTCWWLTTISTDLTFSVKSSRGSSDPQGVTCGAATLSAERVRGDNKEYEYSVECQEDSACPAAEESLPIEVMVDAVHKLKYENYTSSFFIRDIIKPDPPKNLQLKPLKNSRQVEVSWEYPDTWSTPHSYFSLTFCVQVQGKSKREKKDRVFTDKTSATVICRKNASISVRAQDRYYSSSWSEWASVPCS

SEQ ID NO: 1091 - protein, 306 aa, Homo sapiens
  source 1..306: note = Human IL-12 subunit beta (IL-12p40) mature form sequence
IWELKKDVYVVELDWYPDAPGEMVVLTCDTPEEDGITWTLDQSSEVLGSGKTLTIQVKEFGDAGQYTCHKGGEVLSHSLLLLHKKEDGIWSTDILKDQKEPKNKTFLRCEAKNYSGRFTCWWLTTISTDLTFSVKSSRGSSDPQGVTCGAATLSAERVRGDNKEYEYSVECQEDSACPAAEESLPIEVMVDAVHKLKYENYTSSFFIRDIIKPDPPKNLQLKPLKNSRQVEVSWEYPDTWSTPHSYFSLTFCVQVQGKSKREKKDRVFTDKTSATVICRKNASISVRAQDRYYSSSWSEWASVPCS

SEQ ID NO: 1092 - protein, 662 aa, Homo sapiens
  source 1..662: note = Human IL-12 receptor subunit beta-1 (IL-12Rbeta1) sequence
MEPLVTWVVPLLFLFLLSRQGAACRTSECCFQDPPYPDADSGSASGPRDLRCYRISSDRYECSWQYEGPTAGVSHFLRCCLSSGRCCYFAAGSATRLQFSDQAGVSVLYTVTLWVESWARNQTEKSPEVTLQLYNSVKYEPPLGDIKVSKLAGQLRMEWETPDNQVGAEVQFRHRTPSSPWKLGDCGPQDDDTESCLCPLEMNVAQEFQLRRRQLGSQGSSWSKWSSPVCVPPENPPQPQVRFSVEQLGQDGRRRLTLKEQPTQLELPEGCQGLAPGTEVTYRLQLHMLSCPCKAKATRTLHLGKMPYLSGAAYNVAVISSNQFGPGLNQTWHIPADTHTEPVALNISVGTNGTTMYWPARAQSMTYCIEWQPVGQDGGLATCSLTAPQDPDPAGMATYSWSRESGAMGQEKCYYITIFASAHPEKLTLWSTVLSTYHFGGNASAAGTPHHVSVKNHSLDSVSVDWAPSLLSTCPGVLKEYVVRCRDEDSKQVSEHPVQPTETQVTLSGLRAGVAYTVQVRADTAWLRGVWSQPQRFSIEVQVSDWLIFFASLGSFLSILLVGVLGYLGLNRAARHLCPPLPTPCASSAIEFPGGKETWQWINPVDFQEEASLQEALVVEMSWDKGERTEPLEKTELPEGAPELALDTELSLEDGDRCKAKM

SEQ ID NO: 1093 - protein, 522 aa, Homo sapiens
  source 1..522: note = Human IL-12 receptor subunit beta-1 (IL-12Rbeta1), extracellular domain
CRTSECCFQDPPYPDADSGSASGPRDLRCYRISSDRYECSWQYEGPTAGVSHFLRCCLSSGRCCYFAAGSATRLQFSDQAGVSVLYTVTLWVESWARNQTEKSPEVTLQLYNSVKYEPPLGDIKVSKLAGQLRMEWETPDNQVGAEVQFRHRTPSSPWKLGDCGPQDDDTESCLCPLEMNVAQEFQLRRRQLGSQGSSWSKWSSPVCVPPENPPQPQVRFSVEQLGQDGRRRLTLKEQPTQLELPEGCQGLAPGTEVTYRLQLHMLSCPCKAKATRTLHLGKMPYLSGAAYNVAVISSNQFGPGLNQTWHIPADTHTEPVALNISVGTNGTTMYWPARAQSMTYCIEWQPVGQDGGLATCSLTAPQDPDPAGMATYSWSRESGAMGQEKCYYITIFASAHPEKLTLWSTVLSTYHFGGNASAAGTPHHVSVKNHSLDSVSVDWAPSLLSTCPGVLKEYVVRCRDEDSKQVSEHPVQPTETQVTLSGLRAGVAYTVQVRADTAWLRGVWSQPQRFSIEVQVSD

SEQ ID NO: 1094 - protein, 862 aa, Homo sapiens
  source 1..862: note = Human IL-12 receptor subunit beta-2 (IL-12Rbeta2) sequence
MAHTFRGCSLAFMFIITWLLIKAKIDACKRGDVTVKPSHVILLGSTVNITCSLKPRQGCFHYSRRNKLILYKFDRRINFHHGHSLNSQVTGLPLGTTLFVCKLACINSDEIQICGAEIFVGVAPEQPQNLSCIQKGEQGTVACTWERGRDTHLYTEYTLQLSGPKNLTWQKQCKDIYCDYLDFGINLTPESPESNFTAKVTAVNSLGSSSSLPSTFTFLDIVRPLPPWDIRIKFQKASVSRCTLYWRDEGLVLLNRLRYRPSNSRLWNMVNVTKAKGRHDLLDLKPFTEYEFQISSKLHLYKGSWSDWSESLRAQTPEEEPTGMLDVWYMKRHIDYSRQQISLFWKNLSVSEARGKILHYQVTLQELTGGKAMTQNITGHTSWTTVIPRTGNWAVAVSAANSKGSSLPTRINIMNLCEAGLLAPRQVSANSEGMDNILVTWQPPRKDPSAVQEYVVEWRELHPGGDTQVPLNWLRSRPYNVSALISENIKSYICYEIRVYALSGDQGGCSSILGNSKHKAPLSGPHINAITEEKGSILISWNSIPVQEQMGCLLHYRIYWKERDSNSQPQLCEIPYRVSQNSHPINSLQPRVTYVLWMTALTAAGESSHGNEREFCLQGKANWMAFVAPSICIAIIMVGIFSTHYFQQKVFVLLAALRPQWCSREIPDPANSTCAKKYPIAEEKTQLPLDRLLIDWPTPEDPEPLVISEVLHQVTPVFRHPPCSNWPQREKGIQGHQASEKDMMHSASSPPPPRALQAESRQLVDLYKVLESRGSDPKPENPACPWTVLPAGDLPTHDGYLPSNIDDLPSHEAPLADSLEELEPQHISLSVFPSSSLHPLTFSCGDKLTLDQLKMRCDSLML

SEQ ID NO: 1095 - protein, 599 aa, Homo sapiens
  source 1..599: note = Human IL-12 receptor subunit beta-2 (IL-12Rbeta2), extracellular domain
KIDACKRGDVTVKPSHVILLGSTVNITCSLKPRQGCFHYSRRNKLILYKFDRRINFHHGHSLNSQVTGLPLGTTLFVCKLACINSDEIQICGAEIFVGVAPEQPQNLSCIQKGEQGTVACTWERGRDTHLYTEYTLQLSGPKNLTWQKQCKDIYCDYLDFGINLTPESPESNFTAKVTAVNSLGSSSSLPSTFTFLDIVRPLPPWDIRIKFQKASVSRCTLYWRDEGLVLLNRLRYRPSNSRLWNMVNVTKAKGRHDLLDLKPFTEYEFQISSKLHLYKGSWSDWSESLRAQTPEEEPTGMLDVWYMKRHIDYSRQQISLFWKNLSVSEARGKILHYQVTLQELTGGKAMTQNITGHTSWTTVIPRTGNWAVAVSAANSKGSSLPTRINIMNLCEAGLLAPRQVSANSEGMDNILVTWQPPRKDPSAVQEYVVEWRELHPGGDTQVPLNWLRSRPYNVSALISENIKSYICYEIRVYALSGDQGGCSSILGNSKHKAPLSGPHINAITEEKGSILISWNSIPVQEQMGCLLHYRIYWKERDSNSQPQLCEIPYRVSQNSHPINSLQPRVTYVLWMTALTAAGESSHGNEREFCLQGKAN

SEQ ID NO: 1096 - protein, 446 aa, synthetic construct; identical to SEQ ID NO: 1038
  source 1..446: note = XENP40370 Chain 1- 38E2[B7H3]_H2_Fab IgG1_pI(-)_Isosteric_A_PVA_/S267K/L368D/K370S

SEQ ID NO: 1097 - protein, 477 aa, synthetic construct
  source 1..477: note = XENP40370 Chain 2- Numax_VHVL_scFv(GKPGS)4-Fc(216)_IgG1_C220S/PVA_/S267K/S364K /E357Q
QVTLRESGPALVKPTQTLTLTCTFSGFSLSTAGMSVGWIRQPPGKALEWLADIWWDDKKHYNPSLKDRLTISKDTSKNQVVLKVTNMDPADTATYYCARDMIFNFYFDVWGQGTTVTVSSGKPGSGKPGSGKPGSGKPGSDIQMTQSPSTLSASVGDRVTITCSASSRVGYMHWYQQKPGKAPKLLIYDTSKLASGVPSRFSGSGSGTEFTLTISSLQPDDFATYYCFQGSGYPFTFGGGTKVEIKEPKSSDKTHTCPPCPAPPVAGPSVFLFPPKPKDTLMISRTPEVTCVVVDVKHEDPEVKFNWYVDGVEVHNAKTKPREEQYNSTYRVVSVLTVLHQDWLNGKEYKCKVSNKALPAPIEKTISKAKGQPREPQVYTLPPSREQMTKNQVKLTCLVKGFYPSDIAVEWESNGQPENNYKTTPPVLDSDGSFFLYSKLTVDKSRWQQGNVFSCSVMHEALHNHYTQKSLSLSPGK

SEQ ID NO: 1098 - protein, 217 aa, synthetic construct
  source 1..217: note = S239D/I332E : S239D/I332E - ADCC-enhanced Heterodimeric Backbone 1 w/ Xtend monomer 1 (-)
APELLGGPDVFLFPPKPKDTLMISRTPEVTCVVVDVSHEDPEVKFNWYVDGVEVHNAKTKPREEEYNSTYRVVSVLTVLHQDWLNGKEYKCKVSNKALPAPEEKTISKAKGQPREPQVYTLPPSREEMTKNQVSLTCDVSGFYPSDIAVEWESDGQPENNYKTTPPVLDSDGSFFLYSKLTVDKSRWEQGDVFSCSVLHEALHAHYTQKSLSLSPGK

SEQ ID NO: 1099 - protein, 217 aa, synthetic construct
  source 1..217: note = S239D/I332E : S239D/I332E - ADCC-enhanced Heterodimeric Backbone 1 w/ Xtend monomer 2 (+)
APELLGGPDVFLFPPKPKDTLMISRTPEVTCVVVDVSHEDPEVKFNWYVDGVEVHNAKTKPREEQYNSTYRVVSVLTVLHQDWLNGKEYKCKVSNKALPAPEEKTISKAKGQPREPQVYTLPPSREQMTKNQVKLTCLVKGFYPSDIAVEWESNGQPENNYKTTPPVLDSDGSFFLYSKLTVDKSRWQQGNVFSCSVLHEALHAHYTQKSLSLSPGK

SEQ ID NO: 1100 - protein, 217 aa, synthetic construct
  source 1..217: note = S239D : S239D - ADCC-enhanced Heterodimeric Backbone 2 w/ Xtend monomer 1 (-)
APELLGGPDVFLFPPKPKDTLMISRTPEVTCVVVDVSHEDPEVKFNWYVDGVEVHNAKTKPREEEYNSTYRVVSVLTVLHQDWLNGKEYKCKVSNKALPAPIEKTISKAKGQPREPQVYTLPPSREEMTKNQVSLTCDVSGFYPSDIAVEWESDGQPENNYKTTPPVLDSDGSFFLYSKLTVDKSRWEQGDVFSCSVLHEALHAHYTQKSLSLSPGK

SEQ ID NO: 1101 - protein, 217 aa, synthetic construct
  source 1..217: note = S239D : S239D - ADCC-enhanced Heterodimeric Backbone 2 w/ Xtend monomer 2 (+)
APELLGGPDVFLFPPKPKDTLMISRTPEVTCVVVDVSHEDPEVKFNWYVDGVEVHNAKTKPREEQYNSTYRVVSVLTVLHQDWLNGKEYKCKVSNKALPAPIEKTISKAKGQPREPQVYTLPPSREQMTKNQVKLTCLVKGFYPSDIAVEWESNGQPENNYKTTPPVLDSDGSFFLYSKLTVDKSRWQQGNVFSCSVLHEALHAHYTQKSLSLSPGK

SEQ ID NO: 1102 - protein, 217 aa, synthetic construct
  source 1..217: note = I332E : I332E - ADCC-enhanced Heterodimeric Backbone 3 w/ Xtend monomer 1 (-)
APELLGGPSVFLFPPKPKDTLMISRTPEVTCVVVDVSHEDPEVKFNWYVDGVEVHNAKTKPREEEYNSTYRVVSVLTVLHQDWLNGKEYKCKVSNKALPAPEEKTISKAKGQPREPQVYTLPPSREEMTKNQVSLTCDVSGFYPSDIAVEWESDGQPENNYKTTPPVLDSDGSFFLYSKLTVDKSRWEQGDVFSCSVLHEALHAHYTQKSLSLSPGK

SEQ ID NO: 1103 - protein, 217 aa, synthetic construct
  source 1..217: note = I332E : I332E - ADCC-enhanced Heterodimeric Backbone 3 w/ Xtend monomer 2 (+)
APELLGGPSVFLFPPKPKDTLMISRTPEVTCVVVDVSHEDPEVKFNWYVDGVEVHNAKTKPREEQYNSTYRVVSVLTVLHQDWLNGKEYKCKVSNKALPAPEEKTISKAKGQPREPQVYTLPPSREQMTKNQVKLTCLVKGFYPSDIAVEWESNGQPENNYKTTPPVLDSDGSFFLYSKLTVDKSRWQQGNVFSCSVLHEALHAHYTQKSLSLSPGK

SEQ ID NO: 1104 - protein, 217 aa, synthetic construct; identical to SEQ ID NO: 811
  source 1..217: note = WT : S239D/I332E - ADCC-enhanced Heterodimeric Backbone 4 w/ Xtend monomer 1 (-)

SEQ ID NO: 1105 - protein, 217 aa, synthetic construct; identical to SEQ ID NO: 1099
  source 1..217: note = WT : S239D/I332E - ADCC-enhanced Heterodimeric Backbone 4 w/ Xtend monomer 2 (+)

SEQ ID NO: 1106 - protein, 217 aa, synthetic construct; identical to SEQ ID NO: 811
  source 1..217: note = WT : S239D - ADCC-enhanced Heterodimeric Backbone 5 w/ Xtend monomer 1 (-)

SEQ ID NO: 1107 - protein, 217 aa, synthetic construct; identical to SEQ ID NO: 1101
  source 1..217: note = WT : S239D - ADCC-enhanced Heterodimeric Backbone 5 w/ Xtend monomer 2 (+)

SEQ ID NO: 1108 - protein, 217 aa, synthetic construct; identical to SEQ ID NO: 811
  source 1..217: note = WT : I332E - ADCC-enhanced Heterodimeric Backbone 6 w/ Xtend monomer 1 (-)

SEQ ID NO: 1109 - protein, 217 aa, synthetic construct; identical to SEQ ID NO: 1103
  source 1..217: note = WT : I332E - ADCC-enhanced Heterodimeric Backbone 6 w/ Xtend monomer 2 (+)

SEQ ID NO: 1110 - protein, 217 aa, synthetic construct; identical to SEQ ID NO: 1098
  source 1..217: note = S239D/I332E : WT - ADCC-enhanced Heterodimeric Backbone 7 w/ Xtend monomer 1 (-)

SEQ ID NO: 1111 - protein, 217 aa, synthetic construct; identical to SEQ ID NO: 812
  source 1..217: note = S239D/I332E : WT - ADCC-enhanced Heterodimeric Backbone 7 w/ Xtend monomer 2 (+)

SEQ ID NO: 1112 - protein, 217 aa, synthetic construct; identical to SEQ ID NO: 1100
  source 1..217: note = S239D : WT - ADCC-enhanced Heterodimeric Backbone 8 w/ Xtend monomer 1 (-)

SEQ ID NO: 1113 - protein, 217 aa, synthetic construct; identical to SEQ ID NO: 812
  source 1..217: note = S239D : WT - ADCC-enhanced Heterodimeric Backbone 8 w/ Xtend monomer 2 (+)

SEQ ID NO: 1114 - protein, 217 aa, synthetic construct; identical to SEQ ID NO: 1102
  source 1..217: note = I332E : WT - ADCC-enhanced Heterodimeric Backbone 9 w/ Xtend monomer 1 (-)

SEQ ID NO: 1115 - protein, 217 aa, synthetic construct; identical to SEQ ID NO: 812
  source 1..217: note = I332E : WT - ADCC-enhanced Heterodimeric Backbone 9 w/ Xtend monomer 2 (+)

SEQ ID NO: 1116 - protein, 217 aa, synthetic construct; identical to SEQ ID NO: 1098
  source 1..217: note = S239D/I332E : S239D - ADCC-enhanced Heterodimeric Backbone 10 w/ Xtend monomer 1 (-)

SEQ ID NO: 1117 - protein, 217 aa, synthetic construct; identical to SEQ ID NO: 1101
  source 1..217: note = S239D/I332E : S239D - ADCC-enhanced Heterodimeric Backbone 10 w/ Xtend monomer 2 (+)

SEQ ID NO: 1118 - protein, 217 aa, synthetic construct; identical to SEQ ID NO: 1098
  source 1..217: note = S239D/I332E : I332E - ADCC-enhanced Heterodimeric Backbone 11 w/ Xtend monomer 1 (-)

SEQ ID NO: 1119 - protein, 217 aa, synthetic construct; identical to SEQ ID NO: 1103
  source 1..217: note = S239D/I332E : I332E - ADCC-enhanced Heterodimeric Backbone 11 w/ Xtend monomer 2 (+)

SEQ ID NO: 1120 - protein, 217 aa, synthetic construct; identical to SEQ ID NO: 1100
  source 1..217: note = S239D : S239D/I332E - ADCC-enhanced Heterodimeric Backbone 12 w/ Xtend monomer 1 (-)

SEQ ID NO: 1121 - protein, 217 aa, synthetic construct; identical to SEQ ID NO: 1099
  source 1..217: note = S239D : S239D/I332E - ADCC-enhanced Heterodimeric Backbone 12 w/ Xtend monomer 2 (+)

SEQ ID NO: 1122 - protein, 217 aa, synthetic construct; identical to SEQ ID NO: 1102
  source 1..217: note = I332E : S239D/I332E - ADCC-enhanced Heterodimeric Backbone 13 w/ Xtend monomer 1 (-)

SEQ ID NO: 1123 - protein, 217 aa, synthetic construct; identical to SEQ ID NO: 1099
  source 1..217: note = I332E : S239D/I332E - ADCC-enhanced Heterodimeric Backbone 13 w/ Xtend monomer 2 (+)

SEQ ID NO: 1124 - protein, 217 aa, synthetic construct; identical to SEQ ID NO: 1100
  source 1..217: note = S239D : I332E - ADCC-enhanced Heterodimeric Backbone 14 w/ Xtend monomer 1 (-)

SEQ ID NO: 1125 - protein, 217 aa, synthetic construct; identical to SEQ ID NO: 1103
  source 1..217: note = S239D : I332E - ADCC-enhanced Heterodimeric Backbone 14 w/ Xtend monomer 2 (+)

SEQ ID NO: 1126 - protein, 217 aa, synthetic construct; identical to SEQ ID NO: 1102
  source 1..217: note = I332E : S239D - ADCC-enhanced Heterodimeric Backbone 15 w/ Xtend monomer 1 (-)

SEQ ID NO: 1127 - protein, 217 aa, synthetic construct; identical to SEQ ID NO: 1101
  source 1..217: note = I332E : S239D - ADCC-enhanced Heterodimeric Backbone 15 w/ Xtend monomer 2 (+)

SEQ ID NO: 1128-1159 - skipped (32 entries)

SEQ ID NO: 1160 - protein, 447 aa, synthetic construct; identical to SEQ ID NO: 988
  source 1..447: note = XENP40590 Chain 1-38E2[B7H3]_H2_Fab-IgG1_pI(-)_Isosteric_A_L368D/K370S

SEQ ID NO: 1161 - protein, 714 aa, synthetic construct
  source 1..714: note = XENP40590 Chain 2-38E2[B7H3]_H2_Fab_1D7B4[NKG2D]_H1_L1_scFv(GKPGS)4_(G4S)2- Fc(222)_IgG1_S364K/E357Q
EVQLLESGGGLVQPGGSLRLSCAVSGFSLSSYGVIWVRQAPGKGLEYVSWVSSGGSTNYASSVKGRFTISRDTSKNTVYLQMNSLRAEDTAVYFCARGATNSGTDIWGPGTLVTVSSASTKGPSVFPLAPSSKSTSGGTAALGCLVKDYFPEPVTVSWNSGALTSGVHTFPAVLQSSGLYSLSSVVTVPSSSLGTQTYICNVNHKPSNTKVDKKVEPKSCGGGGSGGGGSEVQLLESGGGLVQPGGSLRLSCAASGFTFSSYAMSWVRQAPGKGLEWVSSISASGGSTYYADSVKGRFTISRDNSKNTLYLQMNSLRAEDTAVYYCAKGIFSIYFFYFDYWGQGTLVTVSSGKPGSGKPGSGKPGSGKPGSDIQMTQSPSSLSASVGDRVTITCRASQSISSYLNWYQQKPGKAPKLLIYAASSLQSGVPSRFSGSGSGTDFTLTISSLQPEDFATYYCQQSYSTPYTFGQGTKLEIKGGGGSGGGGSKTHTCPPCPAPELLGGPSVFLFPPKPKDTLMISRTPEVTCVVVDVSHEDPEVKFNWYVDGVEVHNAKTKPREEQYNSTYRVVSVLTVLHQDWLNGKEYKCKVSNKALPAPIEKTISKAKGQPREPQVYTLPPSREQMTKNQVKLTCLVKGFYPSDIAVEWESNGQPENNYKTTPPVLDSDGSFFLYSKLTVDKSRWQQGNVFSCSVMHEALHNHYTQKSLSLSPGK

SEQ ID NO: 1162 - protein, 447 aa, synthetic construct; identical to SEQ ID NO: 988
  source 1..447: note = XENP40888 Chain 1-38E2[B7H3]_H2_Fab-IgG1_pI(-)_Isosteric_A_L368D/K370S

SEQ ID NO: 1163 - protein, 715 aa, synthetic construct
  source 1..715: note = XENP40888 Chain 2-38E2[B7H3]_H2_Fab_ADI27749_A49[NKG2D]_H0_L0_scFv(GKPGS)4_ (G4S)2-Fc(222)_IgG1_S364K/E357Q
EVQLLESGGGLVQPGGSLRLSCAVSGFSLSSYGVIWVRQAPGKGLEYVSWVSSGGSTNYASSVKGRFTISRDTSKNTVYLQMNSLRAEDTAVYFCARGATNSGTDIWGPGTLVTVSSASTKGPSVFPLAPSSKSTSGGTAALGCLVKDYFPEPVTVSWNSGALTSGVHTFPAVLQSSGLYSLSSVVTVPSSSLGTQTYICNVNHKPSNTKVDKKVEPKSCGGGGSGGGGSEVQLVESGGGLVKPGGSLRLSCAASGFTFSSYSMNWVRQAPGKGLEWVSSISSSSSYIYYADSVKGRFTISRDNAKNSLYLQMNSLRAEDTAVYYCARGAPMGAAAGWFDPWGQGTLVTVSSGKPGSGKPGSGKPGSGKPGSDIQMTQSPSSVSASVGDRVTITCRASQGISSWLAWYQQKPGKAPKLLIYAASSLQSGVPSRFSGSGSGTDFTLTISSLQPEDFATYYCQQGVSFPRTFGGGTKVEIKGGGGSGGGGSKTHTCPPCPAPELLGGPSVFLFPPKPKDTLMISRTPEVTCVVVDVSHEDPEVKFNWYVDGVEVHNAKTKPREEQYNSTYRVVSVLTVLHQDWLNGKEYKCKVSNKALPAPIEKTISKAKGQPREPQVYTLPPSREQMTKNQVKLTCLVKGFYPSDIAVEWESNGQPENNYKTTPPVLDSDGSFFLYSKLTVDKSRWQQGNVFSCSVMHEALHNHYTQKSLSLSPGK

SEQ ID NO: 1164 - protein, 447 aa, synthetic construct; identical to SEQ ID NO: 988
  source 1..447: note = XENP40891 Chain 1-38E2[B7H3]_H2_Fab-IgG1_pI(-)_Isosteric_A_L368D/K370S

SEQ ID NO: 1165 - protein, 710 aa, synthetic construct
  source 1..710: note = XENP40891 Chain 2-38E2[B7H3]_H2_Fab-IgG1_S364K/E357Q/K447del_(G4S)3_ADI2774 9_A49[NKG2D]_H0_L0_scFv(GKPGS)4
EVQLLESGGGLVQPGGSLRLSCAVSGFSLSSYGVIWVRQAPGKGLEYVSWVSSGGSTNYASSVKGRFTISRDTSKNTVYLQMNSLRAEDTAVYFCARGATNSGTDIWGPGTLVTVSSASTKGPSVFPLAPSSKSTSGGTAALGCLVKDYFPEPVTVSWNSGALTSGVHTFPAVLQSSGLYSLSSVVTVPSSSLGTQTYICNVNHKPSNTKVDKKVEPKSCDKTHTCPPCPAPELLGGPSVFLFPPKPKDTLMISRTPEVTCVVVDVSHEDPEVKFNWYVDGVEVHNAKTKPREEQYNSTYRVVSVLTVLHQDWLNGKEYKCKVSNKALPAPIEKTISKAKGQPREPQVYTLPPSREQMTKNQVKLTCLVKGFYPSDIAVEWESNGQPENNYKTTPPVLDSDGSFFLYSKLTVDKSRWQQGNVFSCSVMHEALHNHYTQKSLSLSPGGGGGSGGGGSGGGGSEVQLVESGGGLVKPGGSLRLSCAASGFTFSSYSMNWVRQAPGKGLEWVSSISSSSSYIYYADSVKGRFTISRDNAKNSLYLQMNSLRAEDTAVYYCARGAPMGAAAGWFDPWGQGTLVTVSSGKPGSGKPGSGKPGSGKPGSDIQMTQSPSSVSASVGDRVTITCRASQGISSWLAWYQQKPGKAPKLLIYAASSLQSGVPSRFSGSGSGTDFTLTISSLQPEDFATYYCQQGVSFPRTFGGGTKVEIK

SEQ ID NO: 1166 - protein, 447 aa, synthetic construct; identical to SEQ ID NO: 988
  source 1..447: note = XENP41333 Chain 1-38E2[B7H3]_H2_Fab-IgG1_pI(-)_Isosteric_A_L368D/K370S

SEQ ID NO: 1167 - protein, 480 aa, synthetic construct
  source 1..480: note = XENP41333 Chain 2-ADI27744_A44[NKG2D]_L0H0_scFv(GKPGS)4-Fc(216)_IgG1_C220S/ S364K/E357Q
DIQMTQSPSSVSASVGDRVTITCRASQGIDSWLAWYQQKPGKAPKLLIYAASSLQSGVPSRFSGSGSGTDFTLTISSLQPEDFATYYCQQGVSYPRTFGGGTKVEIKGKPGSGKPGSGKPGSGKPGSEVQLLESGGGLVQPGGSLRLSCAASGFTFSSYAMSWVRQAPGKGLEWVSAISGSGGSTYYADSVKGRFTISRDNSKNTLYLQMNSLRAEDTAVYYCAKDGGYYDSGAGDYWGQGTLVTVSSEPKSSDKTHTCPPCPAPELLGGPSVFLFPPKPKDTLMISRTPEVTCVVVDVSHEDPEVKFNWYVDGVEVHNAKTKPREEQYNSTYRVVSVLTVLHQDWLNGKEYKCKVSNKALPAPIEKTISKAKGQPREPQVYTLPPSREQMTKNQVKLTCLVKGFYPSDIAVEWESNGQPENNYKTTPPVLDSDGSFFLYSKLTVDKSRWQQGNVFSCSVMHEALHNHYTQKSLSLSPGK

SEQ ID NO: 1168 - protein, 447 aa, synthetic construct; identical to SEQ ID NO: 988
  source 1..447: note = XENP41334 Chain 1-38E2[B7H3]_H2_Fab-IgG1_pI(-)_Isosteric_A_L368D/K370S

SEQ ID NO: 1169 - protein, 481 aa, synthetic construct
  source 1..481: note = XENP41334 Chain 2-ADI27749_A49[NKG2D]_L0H0_scFv(GKPGS)4-Fc(216)_IgG1_C220S/ S364K/E357Q
DIQMTQSPSSVSASVGDRVTITCRASQGISSWLAWYQQKPGKAPKLLIYAASSLQSGVPSRFSGSGSGTDFTLTISSLQPEDFATYYCQQGVSFPRTFGGGTKVEIKGKPGSGKPGSGKPGSGKPGSEVQLVESGGGLVKPGGSLRLSCAASGFTFSSYSMNWVRQAPGKGLEWVSSISSSSSYIYYADSVKGRFTISRDNAKNSLYLQMNSLRAEDTAVYYCARGAPMGAAAGWFDPWGQGTLVTVSSEPKSSDKTHTCPPCPAPELLGGPSVFLFPPKPKDTLMISRTPEVTCVVVDVSHEDPEVKFNWYVDGVEVHNAKTKPREEQYNSTYRVVSVLTVLHQDWLNGKEYKCKVSNKALPAPIEKTISKAKGQPREPQVYTLPPSREQMTKNQVKLTCLVKGFYPSDIAVEWESNGQPENNYKTTPPVLDSDGSFFLYSKLTVDKSRWQQGNVFSCSVMHEALHNHYTQKSLSLSPGK

SEQ ID NO: 1170 - protein, 447 aa, synthetic construct; identical to SEQ ID NO: 988
  source 1..447: note = XENP41335 Chain 1-38E2[B7H3]_H2_Fab-IgG1_pI(-)_Isosteric_A_L368D/K370S

SEQ ID NO: 1171 - protein, 480 aa, synthetic construct
  source 1..480: note = XENP41335 Chain 2-1D2B4[NKG2D]_L1H1_scFv(GKPGS)4-Fc(216)_IgG1_C220S/S364K/E 357Q
DIQMTQSPSSLSASVGDRVTITCRASQSISSYLNWYQQKPGKAPKLLIYAASSLQSGVPSRFSGSGSGTDFTLTISSLQPEDFATYYCQQSYSTPYTFGQGTKLEIKGKPGSGKPGSGKPGSGKPGSEVQLLESGGGLVQPGGSLRLSCAASGFTFSSFGMSWVRQAPGKGLEWVSTISGSGSTTYYADSVKGRFTISRDNSKNTLYLQMNSLRAEDTAVYYCAKGVFSEWHYYFDYWGQGTLVTVSSEPKSSDKTHTCPPCPAPELLGGPSVFLFPPKPKDTLMISRTPEVTCVVVDVSHEDPEVKFNWYVDGVEVHNAKTKPREEQYNSTYRVVSVLTVLHQDWLNGKEYKCKVSNKALPAPIEKTISKAKGQPREPQVYTLPPSREQMTKNQVKLTCLVKGFYPSDIAVEWESNGQPENNYKTTPPVLDSDGSFFLYSKLTVDKSRWQQGNVFSCSVMHEALHNHYTQKSLSLSPGK

SEQ ID NO: 1172 - protein, 447 aa, synthetic construct; identical to SEQ ID NO: 988
  source 1..447: note = XENP41336 Chain 1-38E2[B7H3]_H2_Fab-IgG1_pI(-)_Isosteric_A_L368D/K370S

SEQ ID NO: 1173 - protein, 480 aa, synthetic construct
  source 1..480: note = XENP41336 Chain 2-1D7B4[NKG2D]_L1H1_scFv(GKPGS)4-Fc(216)_IgG1_C220S/S364K/E 357Q
DIQMTQSPSSLSASVGDRVTITCRASQSISSYLNWYQQKPGKAPKLLIYAASSLQSGVPSRFSGSGSGTDFTLTISSLQPEDFATYYCQQSYSTPYTFGQGTKLEIKGKPGSGKPGSGKPGSGKPGSEVQLLESGGGLVQPGGSLRLSCAASGFTFSSYAMSWVRQAPGKGLEWVSSISASGGSTYYADSVKGRFTISRDNSKNTLYLQMNSLRAEDTAVYYCAKGIFSIYFFYFDYWGQGTLVTVSSEPKSSDKTHTCPPCPAPELLGGPSVFLFPPKPKDTLMISRTPEVTCVVVDVSHEDPEVKFNWYVDGVEVHNAKTKPREEQYNSTYRVVSVLTVLHQDWLNGKEYKCKVSNKALPAPIEKTISKAKGQPREPQVYTLPPSREQMTKNQVKLTCLVKGFYPSDIAVEWESNGQPENNYKTTPPVLDSDGSFFLYSKLTVDKSRWQQGNVFSCSVMHEALHNHYTQKSLSLSPGK

SEQ ID NO: 1174 - protein, 447 aa, synthetic construct; identical to SEQ ID NO: 988
  source 1..447: note = XENP41337 Chain 1-38E2[B7H3]_H2_Fab-IgG1_pI(-)_Isosteric_A_L368D/K370S

SEQ ID NO: 1175 - protein, 714 aa, synthetic construct
  source 1..714: note = XENP41337 Chain 2-38E2[B7H3]_H2_Fab_ADI27744_A44[NKG2D]_L0_H0_scFv(GKPGS)4_ (G4S)2-Fc(222)_IgG1_S364K/E357Q
EVQLLESGGGLVQPGGSLRLSCAVSGFSLSSYGVIWVRQAPGKGLEYVSWVSSGGSTNYASSVKGRFTISRDTSKNTVYLQMNSLRAEDTAVYFCARGATNSGTDIWGPGTLVTVSSASTKGPSVFPLAPSSKSTSGGTAALGCLVKDYFPEPVTVSWNSGALTSGVHTFPAVLQSSGLYSLSSVVTVPSSSLGTQTYICNVNHKPSNTKVDKKVEPKSCGGGGSGGGGSDIQMTQSPSSVSASVGDRVTITCRASQGIDSWLAWYQQKPGKAPKLLIYAASSLQSGVPSRFSGSGSGTDFTLTISSLQPEDFATYYCQQGVSYPRTFGGGTKVEIKGKPGSGKPGSGKPGSGKPGSEVQLLESGGGLVQPGGSLRLSCAASGFTFSSYAMSWVRQAPGKGLEWVSAISGSGGSTYYADSVKGRFTISRDNSKNTLYLQMNSLRAEDTAVYYCAKDGGYYDSGAGDYWGQGTLVTVSSGGGGSGGGGSKTHTCPPCPAPELLGGPSVFLFPPKPKDTLMISRTPEVTCVVVDVSHEDPEVKFNWYVDGVEVHNAKTKPREEQYNSTYRVVSVLTVLHQDWLNGKEYKCKVSNKALPAPIEKTISKAKGQPREPQVYTLPPSREQMTKNQVKLTCLVKGFYPSDIAVEWESNGQPENNYKTTPPVLDSDGSFFLYSKLTVDKSRWQQGNVFSCSVMHEALHNHYTQKSLSLSPGK

SEQ ID NO: 1176 - protein, 447 aa, synthetic construct; identical to SEQ ID NO: 988
  source 1..447: note = XENP41338 Chain 1-38E2[B7H3]_H2_Fab-IgG1_pI(-)_Isosteric_A_L368D/K370S

SEQ ID NO: 1177 - protein, 715 aa, synthetic construct
  source 1..715: note = XENP41338 Chain 2-38E2[B7H3]_H2_Fab_ADI27749_A49[NKG2D]_L0_H0_scFv(GKPGS)4_ (G4S)2-Fc(222)_IgG1_S364K/E357Q
EVQLLESGGGLVQPGGSLRLSCAVSGFSLSSYGVIWVRQAPGKGLEYVSWVSSGGSTNYASSVKGRFTISRDTSKNTVYLQMNSLRAEDTAVYFCARGATNSGTDIWGPGTLVTVSSASTKGPSVFPLAPSSKSTSGGTAALGCLVKDYFPEPVTVSWNSGALTSGVHTFPAVLQSSGLYSLSSVVTVPSSSLGTQTYICNVNHKPSNTKVDKKVEPKSCGGGGSGGGGSDIQMTQSPSSVSASVGDRVTITCRASQGISSWLAWYQQKPGKAPKLLIYAASSLQSGVPSRFSGSGSGTDFTLTISSLQPEDFATYYCQQGVSFPRTFGGGTKVEIKGKPGSGKPGSGKPGSGKPGSEVQLVESGGGLVKPGGSLRLSCAASGFTFSSYSMNWVRQAPGKGLEWVSSISSSSSYIYYADSVKGRFTISRDNAKNSLYLQMNSLRAEDTAVYYCARGAPMGAAAGWFDPWGQGTLVTVSSGGGGSGGGGSKTHTCPPCPAPELLGGPSVFLFPPKPKDTLMISRTPEVTCVVVDVSHEDPEVKFNWYVDGVEVHNAKTKPREEQYNSTYRVVSVLTVLHQDWLNGKEYKCKVSNKALPAPIEKTISKAKGQPREPQVYTLPPSREQMTKNQVKLTCLVKGFYPSDIAVEWESNGQPENNYKTTPPVLDSDGSFFLYSKLTVDKSRWQQGNVFSCSVMHEALHNHYTQKSLSLSPGK

SEQ ID NO: 1178 - protein, 447 aa, synthetic construct; identical to SEQ ID NO: 988
  source 1..447: note = XENP41339 Chain 1-38E2[B7H3]_H2_Fab-IgG1_pI(-)_Isosteric_A_L368D/K370S

SEQ ID NO: 1179 - protein, 714 aa, synthetic construct
  source 1..714: note = XENP41339 Chain 2-38E2[B7H3]_H2_Fab_1D2B4[NKG2D]_L1_H1_scFv(GKPGS)4_(G4S)2- Fc(222)_IgG1_S364K/E357Q
EVQLLESGGGLVQPGGSLRLSCAVSGFSLSSYGVIWVRQAPGKGLEYVSWVSSGGSTNYASSVKGRFTISRDTSKNTVYLQMNSLRAEDTAVYFCARGATNSGTDIWGPGTLVTVSSASTKGPSVFPLAPSSKSTSGGTAALGCLVKDYFPEPVTVSWNSGALTSGVHTFPAVLQSSGLYSLSSVVTVPSSSLGTQTYICNVNHKPSNTKVDKKVEPKSCGGGGSGGGGSDIQMTQSPSSLSASVGDRVTITCRASQSISSYLNWYQQKPGKAPKLLIYAASSLQSGVPSRFSGSGSGTDFTLTISSLQPEDFATYYCQQSYSTPYTFGQGTKLEIKGKPGSGKPGSGKPGSGKPGSEVQLLESGGGLVQPGGSLRLSCAASGFTFSSFGMSWVRQAPGKGLEWVSTISGSGSTTYYADSVKGRFTISRDNSKNTLYLQMNSLRAEDTAVYYCAKGVFSEWHYYFDYWGQGTLVTVSSGGGGSGGGGSKTHTCPPCPAPELLGGPSVFLFPPKPKDTLMISRTPEVTCVVVDVSHEDPEVKFNWYVDGVEVHNAKTKPREEQYNSTYRVVSVLTVLHQDWLNGKEYKCKVSNKALPAPIEKTISKAKGQPREPQVYTLPPSREQMTKNQVKLTCLVKGFYPSDIAVEWESNGQPENNYKTTPPVLDSDGSFFLYSKLTVDKSRWQQGNVFSCSVMHEALHNHYTQKSLSLSPGK

SEQ ID NO: 1180 - protein, 447 aa, synthetic construct; identical to SEQ ID NO: 988
  source 1..447: note = XENP41340 Chain 1-38E2[B7H3]_H2_Fab-IgG1_pI(-)_Isosteric_A_L368D/K370S

SEQ ID NO: 1181 - protein, 714 aa, synthetic construct
  source 1..714: note = XENP41340 Chain 2-38E2[B7H3]_H2_Fab_1D7B4[NKG2D]_L1_H1_scFv(GKPGS)4_(G4S)2- Fc(222)_IgG1_S364K/E357Q
EVQLLESGGGLVQPGGSLRLSCAVSGFSLSSYGVIWVRQAPGKGLEYVSWVSSGGSTNYASSVKGRFTISRDTSKNTVYLQMNSLRAEDTAVYFCARGATNSGTDIWGPGTLVTVSSASTKGPSVFPLAPSSKSTSGGTAALGCLVKDYFPEPVTVSWNSGALTSGVHTFPAVLQSSGLYSLSSVVTVPSSSLGTQTYICNVNHKPSNTKVDKKVEPKSCGGGGSGGGGSDIQMTQSPSSLSASVGDRVTITCRASQSISSYLNWYQQKPGKAPKLLIYAASSLQSGVPSRFSGSGSGTDFTLTISSLQPEDFATYYCQQSYSTPYTFGQGTKLEIKGKPGSGKPGSGKPGSGKPGSEVQLLESGGGLVQPGGSLRLSCAASGFTFSSYAMSWVRQAPGKGLEWVSSISASGGSTYYADSVKGRFTISRDNSKNTLYLQMNSLRAEDTAVYYCAKGIFSIYFFYFDYWGQGTLVTVSSGGGGSGGGGSKTHTCPPCPAPELLGGPSVFLFPPKPKDTLMISRTPEVTCVVVDVSHEDPEVKFNWYVDGVEVHNAKTKPREEQYNSTYRVVSVLTVLHQDWLNGKEYKCKVSNKALPAPIEKTISKAKGQPREPQVYTLPPSREQMTKNQVKLTCLVKGFYPSDIAVEWESNGQPENNYKTTPPVLDSDGSFFLYSKLTVDKSRWQQGNVFSCSVMHEALHNHYTQKSLSLSPGK

SEQ ID NO: 1182 - protein, 447 aa, synthetic construct; identical to SEQ ID NO: 988
  source 1..447: note = XENP41341 Chain 1-38E2[B7H3]_H2_Fab-IgG1_pI(-)_Isosteric_A_L368D/K370S

SEQ ID NO: 1183 - protein, 709 aa, synthetic construct
  source 1..709: note = XENP41341 Chain 2-38E2[B7H3]_H2_Fab-IgG1_S364K/E357Q/K447del_(G4S)3_ADI2774 4_A44[NKG2D]_L0_H0_scFv(GKPGS)4
EVQLLESGGGLVQPGGSLRLSCAVSGFSLSSYGVIWVRQAPGKGLEYVSWVSSGGSTNYASSVKGRFTISRDTSKNTVYLQMNSLRAEDTAVYFCARGATNSGTDIWGPGTLVTVSSASTKGPSVFPLAPSSKSTSGGTAALGCLVKDYFPEPVTVSWNSGALTSGVHTFPAVLQSSGLYSLSSVVTVPSSSLGTQTYICNVNHKPSNTKVDKKVEPKSCDKTHTCPPCPAPELLGGPSVFLFPPKPKDTLMISRTPEVTCVVVDVSHEDPEVKFNWYVDGVEVHNAKTKPREEQYNSTYRVVSVLTVLHQDWLNGKEYKCKVSNKALPAPIEKTISKAKGQPREPQVYTLPPSREQMTKNQVKLTCLVKGFYPSDIAVEWESNGQPENNYKTTPPVLDSDGSFFLYSKLTVDKSRWQQGNVFSCSVMHEALHNHYTQKSLSLSPGGGGGSGGGGSGGGGSDIQMTQSPSSVSASVGDRVTITCRASQGIDSWLAWYQQKPGKAPKLLIYAASSLQSGVPSRFSGSGSGTDFTLTISSLQPEDFATYYCQQGVSYPRTFGGGTKVEIKGKPGSGKPGSGKPGSGKPGSEVQLLESGGGLVQPGGSLRLSCAASGFTFSSYAMSWVRQAPGKGLEWVSAISGSGGSTYYADSVKGRFTISRDNSKNTLYLQMNSLRAEDTAVYYCAKDGGYYDSGAGDYWGQGTLVTVSS

SEQ ID NO: 1184 - protein, 447 aa, synthetic construct; identical to SEQ ID NO: 988
  source 1..447: note = XENP41342 Chain 1-38E2[B7H3]_H2_Fab-IgG1_pI(-)_Isosteric_A_L368D/K370S

SEQ ID NO: 1185 - protein, 710 aa, synthetic construct
  source 1..710: note = XENP41342 Chain 2-38E2[B7H3]_H2_Fab-IgG1_S364K/E357Q/K447del_(G4S)3_ADI2774 9_A49[NKG2D]_L0_H0_scFv(GKPGS)4
EVQLLESGGGLVQPGGSLRLSCAVSGFSLSSYGVIWVRQAPGKGLEYVSWVSSGGSTNYASSVKGRFTISRDTSKNTVYLQMNSLRAEDTAVYFCARGATNSGTDIWGPGTLVTVSSASTKGPSVFPLAPSSKSTSGGTAALGCLVKDYFPEPVTVSWNSGALTSGVHTFPAVLQSSGLYSLSSVVTVPSSSLGTQTYICNVNHKPSNTKVDKKVEPKSCDKTHTCPPCPAPELLGGPSVFLFPPKPKDTLMISRTPEVTCVVVDVSHEDPEVKFNWYVDGVEVHNAKTKPREEQYNSTYRVVSVLTVLHQDWLNGKEYKCKVSNKALPAPIEKTISKAKGQPREPQVYTLPPSREQMTKNQVKLTCLVKGFYPSDIAVEWESNGQPENNYKTTPPVLDSDGSFFLYSKLTVDKSRWQQGNVFSCSVMHEALHNHYTQKSLSLSPGGGGGSGGGGSGGGGSDIQMTQSPSSVSASVGDRVTITCRASQGISSWLAWYQQKPGKAPKLLIYAASSLQSGVPSRFSGSGSGTDFTLTISSLQPEDFATYYCQQGVSFPRTFGGGTKVEIKGKPGSGKPGSGKPGSGKPGSEVQLVESGGGLVKPGGSLRLSCAASGFTFSSYSMNWVRQAPGKGLEWVSSISSSSSYIYYADSVKGRFTISRDNAKNSLYLQMNSLRAEDTAVYYCARGAPMGAAAGWFDPWGQGTLVTVSS

SEQ ID NO: 1186 - protein, 447 aa, synthetic construct; identical to SEQ ID NO: 988
  source 1..447: note = XENP41343 Chain 1-38E2[B7H3]_H2_Fab-IgG1_pI(-)_Isosteric_A_L368D/K370S

SEQ ID NO: 1187 - protein, 709 aa, synthetic construct
  source 1..709: note = XENP41343 Chain 2-38E2[B7H3]_H2_Fab-IgG1_S364K/E357Q/K447del_(G4S)3_1D2B4[N KG2D]_L1_H1_scFv(GKPGS)4
EVQLLESGGGLVQPGGSLRLSCAVSGFSLSSYGVIWVRQAPGKGLEYVSWVSSGGSTNYASSVKGRFTISRDTSKNTVYLQMNSLRAEDTAVYFCARGATNSGTDIWGPGTLVTVSSASTKGPSVFPLAPSSKSTSGGTAALGCLVKDYFPEPVTVSWNSGALTSGVHTFPAVLQSSGLYSLSSVVTVPSSSLGTQTYICNVNHKPSNTKVDKKVEPKSCDKTHTCPPCPAPELLGGPSVFLFPPKPKDTLMISRTPEVTCVVVDVSHEDPEVKFNWYVDGVEVHNAKTKPREEQYNSTYRVVSVLTVLHQDWLNGKEYKCKVSNKALPAPIEKTISKAKGQPREPQVYTLPPSREQMTKNQVKLTCLVKGFYPSDIAVEWESNGQPENNYKTTPPVLDSDGSFFLYSKLTVDKSRWQQGNVFSCSVMHEALHNHYTQKSLSLSPGGGGGSGGGGSGGGGSDIQMTQSPSSLSASVGDRVTITCRASQSISSYLNWYQQKPGKAPKLLIYAASSLQSGVPSRFSGSGSGTDFTLTISSLQPEDFATYYCQQSYSTPYTFGQGTKLEIKGKPGSGKPGSGKPGSGKPGSEVQLLESGGGLVQPGGSLRLSCAASGFTFSSFGMSWVRQAPGKGLEWVSTISGSGSTTYYADSVKGRFTISRDNSKNTLYLQMNSLRAEDTAVYYCAKGVFSEWHYYFDYWGQGTLVTVSS

SEQ ID NO: 1188 - protein, 447 aa, synthetic construct; identical to SEQ ID NO: 988
  source 1..447: note = XENP41344 Chain 1-38E2[B7H3]_H2_Fab-IgG1_pI(-)_Isosteric_A_L368D/K370S

SEQ ID NO: 1189 - protein, 709 aa, synthetic construct
  source 1..709: note = XENP41344 Chain 2-38E2[B7H3]_H2_Fab-IgG1_S364K/E357Q/K447del_(G4S)3_1D7B4[N KG2D]_L1_H1_scFv(GKPGS)4
EVQLLESGGGLVQPGGSLRLSCAVSGFSLSSYGVIWVRQAPGKGLEYVSWVSSGGSTNYASSVKGRFTISRDTSKNTVYLQMNSLRAEDTAVYFCARGATNSGTDIWGPGTLVTVSSASTKGPSVFPLAPSSKSTSGGTAALGCLVKDYFPEPVTVSWNSGALTSGVHTFPAVLQSSGLYSLSSVVTVPSSSLGTQTYICNVNHKPSNTKVDKKVEPKSCDKTHTCPPCPAPELLGGPSVFLFPPKPKDTLMISRTPEVTCVVVDVSHEDPEVKFNWYVDGVEVHNAKTKPREEQYNSTYRVVSVLTVLHQDWLNGKEYKCKVSNKALPAPIEKTISKAKGQPREPQVYTLPPSREQMTKNQVKLTCLVKGFYPSDIAVEWESNGQPENNYKTTPPVLDSDGSFFLYSKLTVDKSRWQQGNVFSCSVMHEALHNHYTQKSLSLSPGGGGGSGGGGSGGGGSDIQMTQSPSSLSASVGDRVTITCRASQSISSYLNWYQQKPGKAPKLLIYAASSLQSGVPSRFSGSGSGTDFTLTISSLQPEDFATYYCQQSYSTPYTFGQGTKLEIKGKPGSGKPGSGKPGSGKPGSEVQLLESGGGLVQPGGSLRLSCAASGFTFSSYAMSWVRQAPGKGLEWVSSISASGGSTYYADSVKGRFTISRDNSKNTLYLQMNSLRAEDTAVYYCAKGIFSIYFFYFDYWGQGTLVTVSS

SEQ ID NO: 1190 - protein, 447 aa, synthetic construct; identical to SEQ ID NO: 4
  source 1..447: note = XENP42658 Chain 1-38E2[B7H3]_H2_Fab-IgG1_pI(-)_Isosteric_A_S239D/I332E/L368 D/K370S

SEQ ID NO: 1191 - protein, 480 aa, synthetic construct
  source 1..480: note = XENP42658 Chain 2-1D7B4[NKG2D]_H1.3_L1_scFv(GKPGS)4-Fc(216)_IgG1_C220S/S239 D/I332E/S364K/E357Q
EVQLLESGGGLVQPGGSLRLSCAASGFTFSSSAMSWVRQAPGKGLEWVSSISASGGSTYYADSVKGRFTISRDNSKNTLYLQMNSLRAEDTAVYYCAKGIFSIYFFYFDYWGQGTLVTVSSGKPGSGKPGSGKPGSGKPGSDIQMTQSPSSLSASVGDRVTITCRASQSISSYLNWYQQKPGKAPKLLIYAASSLQSGVPSRFSGSGSGTDFTLTISSLQPEDFATYYCQQSYSTPYTFGQGTKLEIKEPKSSDKTHTCPPCPAPELLGGPDVFLFPPKPKDTLMISRTPEVTCVVVDVSHEDPEVKFNWYVDGVEVHNAKTKPREEQYNSTYRVVSVLTVLHQDWLNGKEYKCKVSNKALPAPEEKTISKAKGQPREPQVYTLPPSREQMTKNQVKLTCLVKGFYPSDIAVEWESNGQPENNYKTTPPVLDSDGSFFLYSKLTVDKSRWQQGNVFSCSVMHEALHNHYTQKSLSLSPGK

SEQ ID NO: 1192 - protein, 447 aa, synthetic construct; identical to SEQ ID NO: 4
  source 1..447: note = XENP42659 Chain 1-38E2[B7H3]_H2_Fab-IgG1_pI(-)_Isosteric_A_S239D/I332E/L368 D/K370S

SEQ ID NO: 1193 - protein, 480 aa, synthetic construct
  source 1..480: note = XENP42659 Chain 2-1D7B4[NKG2D]_H1.23_L1_scFv(GKPGS)4-Fc(216)_IgG1_C220S/S23 9D/I332E/S364K/E357Q
EVQLLESGGGLVQPGGSLRLSCAASGFTFSSYAMSWVRQAPGKGLEWVSSISASGGSTYYADSVKGRFTISRDNSKNTLYLQMNSLRAEDTAVYYCAKGIFAIYFFYFDYWGQGTLVTVSSGKPGSGKPGSGKPGSGKPGSDIQMTQSPSSLSASVGDRVTITCRASQSISSYLNWYQQKPGKAPKLLIYAASSLQSGVPSRFSGSGSGTDFTLTISSLQPEDFATYYCQQSYSTPYTFGQGTKLEIKEPKSSDKTHTCPPCPAPELLGGPDVFLFPPKPKDTLMISRTPEVTCVVVDVSHEDPEVKFNWYVDGVEVHNAKTKPREEQYNSTYRVVSVLTVLHQDWLNGKEYKCKVSNKALPAPEEKTISKAKGQPREPQVYTLPPSREQMTKNQVKLTCLVKGFYPSDIAVEWESNGQPENNYKTTPPVLDSDGSFFLYSKLTVDKSRWQQGNVFSCSVMHEALHNHYTQKSLSLSPGK

SEQ ID NO: 1194 - protein, 447 aa, synthetic construct; identical to SEQ ID NO: 4
  source 1..447: note = XENP42660 Chain 1-38E2[B7H3]_H2_Fab-IgG1_pI(-)_Isosteric_A_S239D/I332E/L368 D/K370S

SEQ ID NO: 1195 - protein, 480 aa, synthetic construct
  source 1..480: note = XENP42660 Chain 2-1D7B4[NKG2D]_H1.28_L1_scFv(GKPGS)4-Fc(216)_IgG1_C220S/S23 9D/I332E/S364K/E357Q
EVQLLESGGGLVQPGGSLRLSCAASGFTFSSYAMSWVRQAPGKGLEWVSSISASGGSTYYADSVKGRFTISRDNSKNTLYLQMNSLRAEDTAVYYCAKGIFSHYFFYFDYWGQGTLVTVSSGKPGSGKPGSGKPGSGKPGSDIQMTQSPSSLSASVGDRVTITCRASQSISSYLNWYQQKPGKAPKLLIYAASSLQSGVPSRFSGSGSGTDFTLTISSLQPEDFATYYCQQSYSTPYTFGQGTKLEIKEPKSSDKTHTCPPCPAPELLGGPDVFLFPPKPKDTLMISRTPEVTCVVVDVSHEDPEVKFNWYVDGVEVHNAKTKPREEQYNSTYRVVSVLTVLHQDWLNGKEYKCKVSNKALPAPEEKTISKAKGQPREPQVYTLPPSREQMTKNQVKLTCLVKGFYPSDIAVEWESNGQPENNYKTTPPVLDSDGSFFLYSKLTVDKSRWQQGNVFSCSVMHEALHNHYTQKSLSLSPGK

SEQ ID NO: 1196 - protein, 447 aa, synthetic construct; identical to SEQ ID NO: 4
  source 1..447: note = XENP42661 Chain 1-38E2[B7H3]_H2_Fab-IgG1_pI(-)_Isosteric_A_S239D/I332E/L368 D/K370S

SEQ ID NO: 1197 - protein, 480 aa, synthetic construct
  source 1..480: note = XENP42661 Chain 2-1D7B4[NKG2D]_H1.31_L1_scFv(GKPGS)4-Fc(216)_IgG1_C220S/S23 9D/I332E/S364K/E357Q
EVQLLESGGGLVQPGGSLRLSCAASGFTFSSYAMSWVRQAPGKGLEWVSSISASGGSTYYADSVKGRFTISRDNSKNTLYLQMNSLRAEDTAVYYCAKGIFSIAFFYFDYWGQGTLVTVSSGKPGSGKPGSGKPGSGKPGSDIQMTQSPSSLSASVGDRVTITCRASQSISSYLNWYQQKPGKAPKLLIYAASSLQSGVPSRFSGSGSGTDFTLTISSLQPEDFATYYCQQSYSTPYTFGQGTKLEIKEPKSSDKTHTCPPCPAPELLGGPDVFLFPPKPKDTLMISRTPEVTCVVVDVSHEDPEVKFNWYVDGVEVHNAKTKPREEQYNSTYRVVSVLTVLHQDWLNGKEYKCKVSNKALPAPEEKTISKAKGQPREPQVYTLPPSREQMTKNQVKLTCLVKGFYPSDIAVEWESNGQPENNYKTTPPVLDSDGSFFLYSKLTVDKSRWQQGNVFSCSVMHEALHNHYTQKSLSLSPGK

SEQ ID NO: 1198 - protein, 447 aa, synthetic construct; identical to SEQ ID NO: 4
  source 1..447: note = XENP42662 Chain 1-38E2[B7H3]_H2_Fab-IgG1_pI(-)_Isosteric_A_S239D/I332E/L368 D/K370S

SEQ ID NO: 1199 - protein, 480 aa, synthetic construct
  source 1..480: note = XENP42662 Chain 2-1D7B4[NKG2D]_H1.33_L1_scFv(GKPGS)4-Fc(216)_IgG1_C220S/S23 9D/I332E/S364K/E357Q
EVQLLESGGGLVQPGGSLRLSCAASGFTFSSYAMSWVRQAPGKGLEWVSSISASGGSTYYADSVKGRFTISRDNSKNTLYLQMNSLRAEDTAVYYCAKGIFSIEFFYFDYWGQGTLVTVSSGKPGSGKPGSGKPGSGKPGSDIQMTQSPSSLSASVGDRVTITCRASQSISSYLNWYQQKPGKAPKLLIYAASSLQSGVPSRFSGSGSGTDFTLTISSLQPEDFATYYCQQSYSTPYTFGQGTKLEIKEPKSSDKTHTCPPCPAPELLGGPDVFLFPPKPKDTLMISRTPEVTCVVVDVSHEDPEVKFNWYVDGVEVHNAKTKPREEQYNSTYRVVSVLTVLHQDWLNGKEYKCKVSNKALPAPEEKTISKAKGQPREPQVYTLPPSREQMTKNQVKLTCLVKGFYPSDIAVEWESNGQPENNYKTTPPVLDSDGSFFLYSKLTVDKSRWQQGNVFSCSVMHEALHNHYTQKSLSLSPGK

SEQ ID NO: 1200 - protein, 451 aa, synthetic construct
  source 1..451: note = XENP43715 Chain 1-6A1[B7H3]_H1_Fab-IgG1_pI(-)_Isosteric_A_L368D/K370S
EVQLLESGGGLVQPGGSLRLSCAASGFTFSNYYMAWVRQAPGKGLEWVSSISTGGGSTYYRDSVKGRFTISRDNSKSTLYLQMNSLRAEDTAVYYCTTDLSAIAATPFAYWGQGTLVTVSSASTKGPSVFPLAPSSKSTSGGTAALGCLVKDYFPEPVTVSWNSGALTSGVHTFPAVLQSSGLYSLSSVVTVPSSSLGTQTYICNVNHKPSDTKVDKKVEPKSCDKTHTCPPCPAPELLGGPSVFLFPPKPKDTLMISRTPEVTCVVVDVSHEDPEVKFNWYVDGVEVHNAKTKPREEEYNSTYRVVSVLTVLHQDWLNGKEYKCKVSNKALPAPIEKTISKAKGQPREPQVYTLPPSREEMTKNQVSLTCDVSGFYPSDIAVEWESDGQPENNYKTTPPVLDSDGSFFLYSKLTVDKSRWEQGDVFSCSVMHEALHNHYTQKSLSLSPGK

SEQ ID NO: 1201 - protein, 480 aa, synthetic construct; identical to SEQ ID NO: 1037
  source 1..480: note = XENP43715 Chain 2-1D7B4[NKG2D]_H1L1_scFv(GKPGS)4-Fc(216)_IgG1_C220S/S364K/E 357Q

SEQ ID NO: 1202 - protein, 213 aa, synthetic construct; identical to SEQ ID NO: 150
  source 1..213: note = Chain 3-6A1[B7H3]_L1_Light Chain

SEQ ID NO: 1203 - protein, 451 aa, synthetic construct; identical to SEQ ID NO: 1200
  source 1..451: note = XENP43722 Chain 1-6A1[B7H3]_H1_Fab-IgG1_pI(-)_Isosteric_A_L368D/K370S

SEQ ID NO: 1204 - protein, 480 aa, synthetic construct
  source 1..480: note = XENP43722 Chain 2-1D7B4[NKG2D]_H1.31_L1_scFv(GKPGS)4-Fc(216)_IgG1_C220S/S36 4K/E357Q
EVQLLESGGGLVQPGGSLRLSCAASGFTFSSYAMSWVRQAPGKGLEWVSSISASGGSTYYADSVKGRFTISRDNSKNTLYLQMNSLRAEDTAVYYCAKGIFSIAFFYFDYWGQGTLVTVSSGKPGSGKPGSGKPGSGKPGSDIQMTQSPSSLSASVGDRVTITCRASQSISSYLNWYQQKPGKAPKLLIYAASSLQSGVPSRFSGSGSGTDFTLTISSLQPEDFATYYCQQSYSTPYTFGQGTKLEIKEPKSSDKTHTCPPCPAPELLGGPSVFLFPPKPKDTLMISRTPEVTCVVVDVSHEDPEVKFNWYVDGVEVHNAKTKPREEQYNSTYRVVSVLTVLHQDWLNGKEYKCKVSNKALPAPIEKTISKAKGQPREPQVYTLPPSREQMTKNQVKLTCLVKGFYPSDIAVEWESNGQPENNYKTTPPVLDSDGSFFLYSKLTVDKSRWQQGNVFSCSVMHEALHNHYTQKSLSLSPGK

SEQ ID NO: 1205 - protein, 213 aa, synthetic construct; identical to SEQ ID NO: 150
  source 1..213: note = XENP43722 Chain 3-6A1[B7H3]_L1_Light Chain

SEQ ID NO: 1206 - protein, 451 aa, synthetic construct; identical to SEQ ID NO: 1200
  source 1..451: note = XENP43994 Chain 1-6A1[B7H3]_H1_Fab-IgG1_pI(-)_Isosteric_A_L368D/K370S

SEQ ID NO: 1207 - protein, 481 aa, synthetic construct; identical to SEQ ID NO: 1045
  source 1..481: note = XENP43994 Chain 2-ADI27749_A49[NKG2D]_H0L0_scFv(GKPGS)4-Fc(216)_IgG1_C220S/ S364K/E357Q

SEQ ID NO: 1208 - protein, 213 aa, synthetic construct; identical to SEQ ID NO: 150
  source 1..213: note = XENP43994 Chain 3-6A1[B7H3]_L1_Light Chain

SEQ ID NO: 1209 - protein, 677 aa, synthetic construct
  source 1..677: note = XENP42983 Chain 1-38E2[B7H3]_H2_Fab_(G4S)2_38E2[B7H3]_H2_Fab- IgG1_pI(-)_Isosteric_A_S239D/L368D/K370S
EVQLLESGGGLVQPGGSLRLSCAVSGFSLSSYGVIWVRQAPGKGLEYVSWVSSGGSTNYASSVKGRFTISRDTSKNTVYLQMNSLRAEDTAVYFCARGATNSGTDIWGPGTLVTVSSASTKGPSVFPLAPSSKSTSGGTAALGCLVKDYFPEPVTVSWNSGALTSGVHTFPAVLQSSGLYSLSSVVTVPSSSLGTQTYICNVNHKPSDTKVDKKVEPKSCGGGGSGGGGSEVQLLESGGGLVQPGGSLRLSCAVSGFSLSSYGVIWVRQAPGKGLEYVSWVSSGGSTNYASSVKGRFTISRDTSKNTVYLQMNSLRAEDTAVYFCARGATNSGTDIWGPGTLVTVSSASTKGPSVFPLAPSSKSTSGGTAALGCLVKDYFPEPVTVSWNSGALTSGVHTFPAVLQSSGLYSLSSVVTVPSSSLGTQTYICNVNHKPSDTKVDKKVEPKSCDKTHTCPPCPAPELLGGPDVFLFPPKPKDTLMISRTPEVTCVVVDVSHEDPEVKFNWYVDGVEVHNAKTKPREEEYNSTYRVVSVLTVLHQDWLNGKEYKCKVSNKALPAPIEKTISKAKGQPREPQVYTLPPSREEMTKNQVSLTCDVSGFYPSDIAVEWESDGQPENNYKTTPPVLDSDGSFFLYSKLTVDKSRWEQGDVFSCSVMHEALHNHYTQKSLSLSPGK

SEQ ID NO: 1210 - protein, 480 aa, synthetic construct
  source 1..480: note = XENP42983 Chain 2-1D7B4[NKG2D]_L1H1_scFv(GKPGS)4_Fc(216)_IgG1_C220S/S239D/S 364K/E357Q
DIQMTQSPSSLSASVGDRVTITCRASQSISSYLNWYQQKPGKAPKLLIYAASSLQSGVPSRFSGSGSGTDFTLTISSLQPEDFATYYCQQSYSTPYTFGQGTKLEIKGKPGSGKPGSGKPGSGKPGSEVQLLESGGGLVQPGGSLRLSCAASGFTFSSIAMSWVRQAPGKGLEWVSSISASGGSTYYADSVKGRFTISRDNSKNTLYLQMNSLRAEDTAVYYCAKGIFSIYFFYFDYWGQGTLVTVSSEPKSSDKTHTCPPCPAPELLGGPDVFLFPPKPKDTLMISRTPEVTCVVVDVSHEDPEVKFNWYVDGVEVHNAKTKPREEQYNSTYRVVSVLTVLHQDWLNGKEYKCKVSNKALPAPIEKTISKAKGQPREPQVYTLPPSREQMTKNQVKLTCLVKGFYPSDIAVEWESNGQPENNYKTTPPVLDSDGSFFLYSKLTVDKSRWQQGNVFSCSVMHEALHNHYTQKSLSLSPGK

SEQ ID NO: 1211 - protein, 121 aa, synthetic construct
  source 1..121: note = 1D7B4[NKG2D]_H1.1 - Variable heavy (vh) domain
EVQLLESGGGLVQPGGSLRLSCAASGFTFSSIAMSWVRQAPGKGLEWVSSISASGGSTYYADSVKGRFTISRDNSKNTLYLQMNSLRAEDTAVYYCAKGIFSIYFFYFDYWGQGTLVTVSS

SEQ ID NO: 1212 - protein, 5 aa, synthetic construct
  source 1..5: note = 1D7B4[NKG2D]_H1.1 - vhCDR1
SIAMS

SEQ ID NO: 1213 - protein, 121 aa, synthetic construct
  source 1..121: note = 1D7B4[NKG2D]_H1.2 - Variable heavy (vh) domain
EVQLLESGGGLVQPGGSLRLSCAASGFTFSSAAMSWVRQAPGKGLEWVSSISASGGSTYYADSVKGRFTISRDNSKNTLYLQMNSLRAEDTAVYYCAKGIFSIYFFYFDYWGQGTLVTVSS

SEQ ID NO: 1214 - protein, 5 aa, synthetic construct
  source 1..5: note = 1D7B4[NKG2D]_H1.2 - vhCDR1
SAAMS

SEQ ID NO: 1215 - protein, 121 aa, synthetic construct
  source 1..121: note = 1D7B4[NKG2D]_H1.3 - Variable heavy (vh) domain
EVQLLESGGGLVQPGGSLRLSCAASGFTFSSSAMSWVRQAPGKGLEWVSSISASGGSTYYADSVKGRFTISRDNSKNTLYLQMNSLRAEDTAVYYCAKGIFSIYFFYFDYWGQGTLVTVSS

SEQ ID NO: 1216 - protein, 5 aa, synthetic construct
  source 1..5: note = 1D7B4[NKG2D]_H1.3 - vhCDR1
SSAMS

SEQ ID NO: 1217 - protein, 121 aa, synthetic construct
  source 1..121: note = 1D7B4[NKG2D]_H1.4 - Variable heavy (vh) domain
EVQLLESGGGLVQPGGSLRLSCAASGFTFSSEAMSWVRQAPGKGLEWVSSISASGGSTYYADSVKGRFTISRDNSKNTLYLQMNSLRAEDTAVYYCAKGIFSIYFFYFDYWGQGTLVTVSS

SEQ ID NO: 1218 - protein, 5 aa, synthetic construct
  source 1..5: note = 1D7B4[NKG2D]_H1.4 - vhCDR1
SEAMS

SEQ ID NO: 1219 - protein, 121 aa, synthetic construct
  source 1..121: note = 1D7B4[NKG2D]_H1.5 - Variable heavy (vh) domain
EVQLLESGGGLVQPGGSLRLSCAASGFTFSSHAMSWVRQAPGKGLEWVSSISASGGSTYYADSVKGRFTISRDNSKNTLYLQMNSLRAEDTAVYYCAKGIFSIYFFYFDYWGQGTLVTVSS

SEQ ID NO: 1220 - protein, 5 aa, synthetic construct
  source 1..5: note = 1D7B4[NKG2D]_H1.5 - vhCDR1
SHAMS

SEQ ID NO: 1221 - protein, 121 aa, synthetic construct
  source 1..121: note = 1D7B4[NKG2D]_H1.6 - Variable heavy (vh) domain
EVQLLESGGGLVQPGGSLRLSCAASGFTFSSQAMSWVRQAPGKGLEWVSSISASGGSTYYADSVKGRFTISRDNSKNTLYLQMNSLRAEDTAVYYCAKGIFSIYFFYFDYWGQGTLVTVSS

SEQ ID NO: 1222 - protein, 5 aa, synthetic construct
  source 1..5: note = 1D7B4[NKG2D]_H1.6 - vhCDR1
SQAMS

SEQ ID NO: 1223 - protein, 121 aa, synthetic construct
  source 1..121: note = 1D7B4[NKG2D]_H1.7 - Variable heavy (vh) domain
EVQLLESGGGLVQPGGSLRLSCAASGFTFSSYFMSWVRQAPGKGLEWVSSISASGGSTYYADSVKGRFTISRDNSKNTLYLQMNSLRAEDTAVYYCAKGIFSIYFFYFDYWGQGTLVTVSS

SEQ ID NO: 1224 - protein, 5 aa, synthetic construct
  source 1..5: note = 1D7B4[NKG2D]_H1.7 - vhCDR1
SYFMS

SEQ ID NO: 1225 - protein, 121 aa, synthetic construct
  source 1..121: note = 1D7B4[NKG2D]_H1.8 - Variable heavy (vh) domain
EVQLLESGGGLVQPGGSLRLSCAASGFTFSSYHMSWVRQAPGKGLEWVSSISASGGSTYYADSVKGRFTISRDNSKNTLYLQMNSLRAEDTAVYYCAKGIFSIYFFYFDYWGQGTLVTVSS

SEQ ID NO: 1226 - protein, 5 aa, synthetic construct
  source 1..5: note = 1D7B4[NKG2D]_H1.8 - vhCDR1
SYHMS

SEQ ID NO: 1227 - protein, 121 aa, synthetic construct
  source 1..121: note = 1D7B4[NKG2D]_H1.9 - Variable heavy (vh) domain
EVQLLESGGGLVQPGGSLRLSCAASGFTFSSYAMSWVRQAPGKGLEWVSSISASGGSTYYADSVKGRFTISRDNSKNTLYLQMNSLRAEDTAVYYCAKGWFSIYFFYFDYWGQGTLVTVSS

SEQ ID NO: 1228 - protein, 12 aa, synthetic construct
  source 1..12: note = 1D7B4[NKG2D]_H1.9 - vhCDR3
GWFSIYFFYFDY

SEQ ID NO: 1229 - protein, 121 aa, synthetic construct
  source 1..121: note = 1D7B4[NKG2D]_H1.10 - Variable heavy (vh) domain
EVQLLESGGGLVQPGGSLRLSCAASGFTFSSYAMSWVRQAPGKGLEWVSSISASGGSTYYADSVKGRFTISRDNSKNTLYLQMNSLRAEDTAVYYCAKGEFSIYFFYFDYWGQGTLVTVSS

SEQ ID NO: 1230 - protein, 12 aa, synthetic construct
  source 1..12: note = 1D7B4[NKG2D]_H1.10 - vhCDR3
GEFSIYFFYFDY

SEQ ID NO: 1231 - protein, 121 aa, synthetic construct
  source 1..121: note = 1D7B4[NKG2D]_H1.11 - Variable heavy (vh) domain
EVQLLESGGGLVQPGGSLRLSCAASGFTFSSYAMSWVRQAPGKGLEWVSSISASGGSTYYADSVKGRFTISRDNSKNTLYLQMNSLRAEDTAVYYCAKGKFSIYFFYFDYWGQGTLVTVSS

SEQ ID NO: 1232 - protein, 12 aa, synthetic construct
  source 1..12: note = 1D7B4[NKG2D]_H1.11 - vhCDR3
GKFSIYFFYFDY

SEQ ID NO: 1233 - protein, 121 aa, synthetic construct
  source 1..121: note = 1D7B4[NKG2D]_H1.12 - Variable heavy (vh) domain
EVQLLESGGGLVQPGGSLRLSCAASGFTFSSYAMSWVRQAPGKGLEWVSSISASGGSTYYADSVKGRFTISRDNSKNTLYLQMNSLRAEDTAVYYCAKGAFSIYFFYFDYWGQGTLVTVSS

SEQ ID NO: 1234 - protein, 12 aa, synthetic construct
  source 1..12: note = 1D7B4[NKG2D]_H1.12 - vhCDR3
GAFSIYFFYFDY

SEQ ID NO: 1235 - protein, 120 aa, synthetic construct
  source 1..120: note = 1D7B4[NKG2D]_H1.13 - Variable heavy (vh) domain
EVQLLESGGGLVQPGGSLRLSCAASGFTFSSYAMSWVRQAPGKGLEWVSSISASGGSTYYADSVKGRFTISRDNSKNTLYLQMNSLRAEDTAVYYCAKGHFSIYFFYFDYWGQGTLVTVS

SEQ ID NO: 1236 - protein, 12 aa, synthetic construct
  source 1..12: note = 1D7B4[NKG2D]_H1.13 - vhCDR3
GHFSIYFFYFDY

SEQ ID NO: 1237 - protein, 121 aa, synthetic construct
  source 1..121: note = 1D7B4[NKG2D]_H1.14 - Variable heavy (vh) domain
EVQLLESGGGLVQPGGSLRLSCAASGFTFSSYAMSWVRQAPGKGLEWVSSISASGGSTYYADSVKGRFTISRDNSKNTLYLQMNSLRAEDTAVYYCAKGIESIYFFYFDYWGQGTLVTVSS

SEQ ID NO: 1238 - protein, 12 aa, synthetic construct
  source 1..12: note = 1D7B4[NKG2D]_H1.14 - vhCDR3
GIESIYFFYFDY

SEQ ID NO: 1239 - protein, 121 aa, synthetic construct
  source 1..121: note = 1D7B4[NKG2D]_H1.15 - Variable heavy (vh) domain
EVQLLESGGGLVQPGGSLRLSCAASGFTFSSYAMSWVRQAPGKGLEWVSSISASGGSTYYADSVKGRFTISRDNSKNTLYLQMNSLRAEDTAVYYCAKGIASIYFFYFDYWGQGTLVTVSS

SEQ ID NO: 1240 - protein, 12 aa, synthetic construct
  source 1..12: note = 1D7B4[NKG2D]_H1.15 - vhCDR3
GIASIYFFYFDY

SEQ ID NO: 1241 - protein, 121 aa, synthetic construct
  source 1..121: note = 1D7B4[NKG2D]_H1.16 - Variable heavy (vh) domain
EVQLLESGGGLVQPGGSLRLSCAASGFTFSSYAMSWVRQAPGKGLEWVSSISASGGSTYYADSVKGRFTISRDNSKNTLYLQMNSLRAEDTAVYYCAKGIWSIYFFYFDYWGQGTLVTVSS

SEQ ID NO: 1242 - protein, 12 aa, synthetic construct
  source 1..12: note = 1D7B4[NKG2D]_H1.16 - vhCDR3
GIWSIYFFYFDY

SEQ ID NO: 1243 - protein, 121 aa, synthetic construct
  source 1..121: note = 1D7B4[NKG2D]_H1.17 - Variable heavy (vh) domain
EVQLLESGGGLVQPGGSLRLSCAASGFTFSSYAMSWVRQAPGKGLEWVSSISASGGSTYYADSVKGRFTISRDNSKNTLYLQMNSLRAEDTAVYYCAKGIQSIYFFYFDYWGQGTLVTVSS

SEQ ID NO: 1244 - protein, 12 aa, synthetic construct
  source 1..12: note = 1D7B4[NKG2D]_H1.17 - vhCDR3
GIQSIYFFYFDY

SEQ ID NO: 1245 - protein, 121 aa, synthetic construct
  source 1..121: note = 1D7B4[NKG2D]_H1.18 - Variable heavy (vh) domain
EVQLLESGGGLVQPGGSLRLSCAASGFTFSSYAMSWVRQAPGKGLEWVSSISASGGSTYYADSVKGRFTISRDNSKNTLYLQMNSLRAEDTAVYYCAKGISSIYFFYFDYWGQGTLVTVSS

SEQ ID NO: 1246 - protein, 12 aa, synthetic construct
  source 1..12: note = 1D7B4[NKG2D]_H1.18 - vhCDR3
GISSIYFFYFDY

SEQ ID NO: 1247 - protein, 121 aa, synthetic construct
  source 1..121: note = 1D7B4[NKG2D]_H1.19 - Variable heavy (vh) domain
EVQLLESGGGLVQPGGSLRLSCAASGFTFSSYAMSWVRQAPGKGLEWVSSISASGGSTYYADSVKGRFTISRDNSKNTLYLQMNSLRAEDTAVYYCAKGIHSIYFFYFDYWGQGTLVTVSS

SEQ ID NO: 1248 - protein, 12 aa, synthetic construct
  source 1..12: note = 1D7B4[NKG2D]_H1.19 - vhCDR3
GIHSIYFFYFDY

SEQ ID NO: 1249 - protein, 121 aa, synthetic construct
  source 1..121: note = 1D7B4[NKG2D]_H1.20 - Variable heavy (vh) domain
EVQLLESGGGLVQPGGSLRLSCAASGFTFSSYAMSWVRQAPGKGLEWVSSISASGGSTYYADSVKGRFTISRDNSKNTLYLQMNSLRAEDTAVYYCAKGIISIYFFYFDYWGQGTLVTVSS

SEQ ID NO: 1250 - protein, 12 aa, synthetic construct
  source 1..12: note = 1D7B4[NKG2D]_H1.20 - vhCDR3
GIISIYFFYFDY

SEQ ID NO: 1251 - protein, 121 aa, synthetic construct
  source 1..121: note = 1D7B4[NKG2D]_H1.21 - Variable heavy (vh) domain
EVQLLESGGGLVQPGGSLRLSCAASGFTFSSYAMSWVRQAPGKGLEWVSSISASGGSTYYADSVKGRFTISRDNSKNTLYLQMNSLRAEDTAVYYCAKGIFYIYFFYFDYWGQGTLVTVSS

SEQ ID NO: 1252 - protein, 12 aa, synthetic construct
  source 1..12: note = 1D7B4[NKG2D]_H1.21 - vhCDR3
GIFYIYFFYFDY

SEQ ID NO: 1253 - protein, 121 aa, synthetic construct
  source 1..121: note = 1D7B4[NKG2D]_H1.22 - Variable heavy (vh) domain
EVQLLESGGGLVQPGGSLRLSCAASGFTFSSYAMSWVRQAPGKGLEWVSSISASGGSTYYADSVKGRFTISRDNSKNTLYLQMNSLRAEDTAVYYCAKGIFEIYFFYFDYWGQGTLVTVSS

SEQ ID NO: 1254 - protein, 12 aa, synthetic construct
  source 1..12: note = 1D7B4[NKG2D]_H1.22 - vhCDR3
GIFEIYFFYFDY

SEQ ID NO: 1255 - protein, 121 aa, synthetic construct
  source 1..121: note = 1D7B4[NKG2D]_H1.23 - Variable heavy (vh) domain
EVQLLESGGGLVQPGGSLRLSCAASGFTFSSYAMSWVRQAPGKGLEWVSSISASGGSTYYADSVKGRFTISRDNSKNTLYLQMNSLRAEDTAVYYCAKGIFAIYFFYFDYWGQGTLVTVSS

SEQ ID NO: 1256 - protein, 12 aa, synthetic construct
  source 1..12: note = 1D7B4[NKG2D]_H1.23 - vhCDR3
GIFAIYFFYFDY

SEQ ID NO: 1257 - protein, 121 aa, synthetic construct
  source 1..121: note = 1D7B4[NKG2D]_H1.24 - Variable heavy (vh) domain
EVQLLESGGGLVQPGGSLRLSCAASGFTFSSYAMSWVRQAPGKGLEWVSSISASGGSTYYADSVKGRFTISRDNSKNTLYLQMNSLRAEDTAVYYCAKGIFSWYFFYFDYWGQGTLVTVSS

SEQ ID NO: 1258 - protein, 12 aa, synthetic construct
  source 1..12: note = 1D7B4[NKG2D]_H1.24 - vhCDR3
GIFSWYFFYFDY

SEQ ID NO: 1259 - protein, 121 aa, synthetic construct
  source 1..121: note = 1D7B4[NKG2D]_H1.25 - Variable heavy (vh) domain
EVQLLESGGGLVQPGGSLRLSCAASGFTFSSYAMSWVRQAPGKGLEWVSSISASGGSTYYADSVKGRFTISRDNSKNTLYLQMNSLRAEDTAVYYCAKGIFSAYFFYFDYWGQGTLVTVSS

SEQ ID NO: 1260 - protein, 12 aa, synthetic construct
  source 1..12: note = 1D7B4[NKG2D]_H1.25 - vhCDR3
GIFSAYFFYFDY

SEQ ID NO: 1261 - protein, 121 aa, synthetic construct
  source 1..121: note = 1D7B4[NKG2D]_H1.26 - Variable heavy (vh) domain
EVQLLESGGGLVQPGGSLRLSCAASGFTFSSYAMSWVRQAPGKGLEWVSSISASGGSTYYADSVKGRFTISRDNSKNTLYLQMNSLRAEDTAVYYCAKGIFSQYFFYFDYWGQGTLVTVSS

SEQ ID NO: 1262 - protein, 12 aa, synthetic construct
  source 1..12: note = 1D7B4[NKG2D]_H1.26 - vhCDR3
GIFSQYFFYFDY

SEQ ID NO: 1263 - protein, 121 aa, synthetic construct
  source 1..121: note = 1D7B4[NKG2D]_H1.27 - Variable heavy (vh) domain
EVQLLESGGGLVQPGGSLRLSCAASGFTFSSYAMSWVRQAPGKGLEWVSSISASGGSTYYADSVKGRFTISRDNSKNTLYLQMNSLRAEDTAVYYCAKGIFSEYFFYFDYWGQGTLVTVSS

SEQ ID NO: 1264 - protein, 12 aa, synthetic construct
  source 1..12: note = 1D7B4[NKG2D]_H1.27 - vhCDR3
GIFSEYFFYFDY

SEQ ID NO: 1265 - protein, 121 aa, synthetic construct
  source 1..121: note = 1D7B4[NKG2D]_H1.28 - Variable heavy (vh) domain
EVQLLESGGGLVQPGGSLRLSCAASGFTFSSYAMSWVRQAPGKGLEWVSSISASGGSTYYADSVKGRFTISRDNSKNTLYLQMNSLRAEDTAVYYCAKGIFSHYFFYFDYWGQGTLVTVSS

SEQ ID NO: 1266 - protein, 12 aa, synthetic construct
  source 1..12: note = 1D7B4[NKG2D]_H1.28 - vhCDR3
GIFSHYFFYFDY

SEQ ID NO: 1267 - protein, 121 aa, synthetic construct
  source 1..121: note = 1D7B4[NKG2D]_H1.29 - Variable heavy (vh) domain
EVQLLESGGGLVQPGGSLRLSCAASGFTFSSYAMSWVRQAPGKGLEWVSSISASGGSTYYADSVKGRFTISRDNSKNTLYLQMNSLRAEDTAVYYCAKGIFSSYFFYFDYWGQGTLVTVSS

SEQ ID NO: 1268 - protein, 12 aa, synthetic construct
  source 1..12: note = 1D7B4[NKG2D]_H1.29 - vhCDR3
GIFSSYFFYFDY

SEQ ID NO: 1269 - protein, 121 aa, synthetic construct
  source 1..121: note = 1D7B4[NKG2D]_H1.30 - Variable heavy (vh) domain
EVQLLESGGGLVQPGGSLRLSCAASGFTFSSYAMSWVRQAPGKGLEWVSSISASGGSTYYADSVKGRFTISRDNSKNTLYLQMNSLRAEDTAVYYCAKGIFSIHFFYFDYWGQGTLVTVSS

SEQ ID NO: 1270 - protein, 12 aa, synthetic construct
  source 1..12: note = 1D7B4[NKG2D]_H1.30 - vhCDR3
GIFSIHFFYFDY

SEQ ID NO: 1271 - protein, 121 aa, synthetic construct
  source 1..121: note = 1D7B4[NKG2D]_H1.31 - Variable heavy (vh) domain
EVQLLESGGGLVQPGGSLRLSCAASGFTFSSYAMSWVRQAPGKGLEWVSSISASGGSTYYADSVKGRFTISRDNSKNTLYLQMNSLRAEDTAVYYCAKGIFSIAFFYFDYWGQGTLVTVSS

SEQ ID NO: 1272 - protein, 12 aa, synthetic construct
  source 1..12: note = 1D7B4[NKG2D]_H1.31 - vhCDR3
GIFSIAFFYFDY

SEQ ID NO: 1273 - protein, 121 aa, synthetic construct
  source 1..121: note = 1D7B4[NKG2D]_H1.32 - Variable heavy (vh) domain
EVQLLESGGGLVQPGGSLRLSCAASGFTFSSYAMSWVRQAPGKGLEWVSSISASGGSTYYADSVKGRFTISRDNSKNTLYLQMNSLRAEDTAVYYCAKGIFSISFFYFDYWGQGTLVTVSS

SEQ ID NO: 1274 - protein, 12 aa, synthetic construct
  source 1..12: note = 1D7B4[NKG2D]_H1.32 - vhCDR3
GIFSISFFYFDY

SEQ ID NO: 1275 - protein, 121 aa, synthetic construct
  source 1..121: note = 1D7B4[NKG2D]_H1.33 - Variable heavy (vh) domain
EVQLLESGGGLVQPGGSLRLSCAASGFTFSSYAMSWVRQAPGKGLEWVSSISASGGSTYYADSVKGRFTISRDNSKNTLYLQMNSLRAEDTAVYYCAKGIFSIEFFYFDYWGQGTLVTVSS

SEQ ID NO: 1276 - protein, 12 aa, synthetic construct
  source 1..12: note = 1D7B4[NKG2D]_H1.33 - vhCDR3
GIFSIEFFYFDY

SEQ ID NO: 1277 - protein, 121 aa, synthetic construct
  source 1..121: note = 1D7B4[NKG2D]_H1.34 - Variable heavy (vh) domain
EVQLLESGGGLVQPGGSLRLSCAASGFTFSSYAMSWVRQAPGKGLEWVSSISASGGSTYYADSVKGRFTISRDNSKNTLYLQMNSLRAEDTAVYYCAKGIFSIQFFYFDYWGQGTLVTVSS

SEQ ID NO: 1278 - protein, 12 aa, synthetic construct
  source 1..12: note = 1D7B4[NKG2D]_H1.34 - vhCDR3
GIFSIQFFYFDY

SEQ ID NO: 1279 - protein, 121 aa, synthetic construct
  source 1..121: note = 1D7B4[NKG2D]_H1.35 - Variable heavy (vh) domain
EVQLLESGGGLVQPGGSLRLSCAASGFTFSSYAMSWVRQAPGKGLEWVSSISASGGSTYYADSVKGRFTISRDNSKNTLYLQMNSLRAEDTAVYYCAKGIFSILFFYFDYWGQGTLVTVSS

SEQ ID NO: 1280 - protein, 12 aa, synthetic construct
  source 1..12: note = 1D7B4[NKG2D]_H1.35 - vhCDR3
GIFSILFFYFDY

SEQ ID NO: 1281 - protein, 121 aa, synthetic construct
  source 1..121: note = 1D7B4[NKG2D]_H1.36 - Variable heavy (vh) domain
EVQLLESGGGLVQPGGSLRLSCAASGFTFSSYAMSWVRQAPGKGLEWVSSISASGGSTYYADSVKGRFTISRDNSKNTLYLQMNSLRAEDTAVYYCAKGIFSIYHFYFDYWGQGTLVTVSS

SEQ ID NO: 1282 - protein, 12 aa, synthetic construct
  source 1..12: note = 1D7B4[NKG2D]_H1.36 - vhCDR3
GIFSIYHFYFDY

SEQ ID NO: 1283 - protein, 121 aa, synthetic construct
  source 1..121: note = 1D7B4[NKG2D]_H1.37 - Variable heavy (vh) domain
EVQLLESGGGLVQPGGSLRLSCAASGFTFSSYAMSWVRQAPGKGLEWVSSISASGGSTYYADSVKGRFTISRDNSKNTLYLQMNSLRAEDTAVYYCAKGIFSIYAFYFDYWGQGTLVTVSS

SEQ ID NO: 1284 - protein, 12 aa, synthetic construct
  source 1..12: note = 1D7B4[NKG2D]_H1.37 - vhCDR3
GIFSIYAFYFDY

SEQ ID NO: 1285 - protein, 121 aa, synthetic construct
  source 1..121: note = 1D7B4[NKG2D]_H1.38 - Variable heavy (vh) domain
EVQLLESGGGLVQPGGSLRLSCAASGFTFSSYAMSWVRQAPGKGLEWVSSISASGGSTYYADSVKGRFTISRDNSKNTLYLQMNSLRAEDTAVYYCAKGIFSIYSFYFDYWGQGTLVTVSS

SEQ ID NO: 1286 - protein, 12 aa, synthetic construct
  source 1..12: note = 1D7B4[NKG2D]_H1.38 - vhCDR3
GIFSIYSFYFDY

SEQ ID NO: 1287 - protein, 121 aa, synthetic construct
  source 1..121: note = 1D7B4[NKG2D]_H1.39 - Variable heavy (vh) domain
EVQLLESGGGLVQPGGSLRLSCAASGFTFSSYAMSWVRQAPGKGLEWVSSISASGGSTYYADSVKGRFTISRDNSKNTLYLQMNSLRAEDTAVYYCAKGIFSIYEFYFDYWGQGTLVTVSS

SEQ ID NO: 1288 - protein, 12 aa, synthetic construct
  source 1..12: note = 1D7B4[NKG2D]_H1.39 - vhCDR3
GIFSIYEFYFDY

SEQ ID NO: 1289 - protein, 121 aa, synthetic construct
  source 1..121: note = 1D7B4[NKG2D]_H1.40 - Variable heavy (vh) domain
EVQLLESGGGLVQPGGSLRLSCAASGFTFSSYAMSWVRQAPGKGLEWVSSISASGGSTYYADSVKGRFTISRDNSKNTLYLQMNSLRAEDTAVYYCAKGIFSIYQFYFDYWGQGTLVTVSS

SEQ ID NO: 1290 - protein, 12 aa, synthetic construct
  source 1..12: note = 1D7B4[NKG2D]_H1.40 - vhCDR3
GIFSIYQFYFDY

SEQ ID NO: 1291 - protein, 121 aa, synthetic construct
  source 1..121: note = 1D7B4[NKG2D]_H1.41 - Variable heavy (vh) domain
EVQLLESGGGLVQPGGSLRLSCAASGFTFSSYAMSWVRQAPGKGLEWVSSISASGGSTYYADSVKGRFTISRDNSKNTLYLQMNSLRAEDTAVYYCAKGIFSIYLFYFDYWGQGTLVTVSS

SEQ ID NO: 1292 - protein, 12 aa, synthetic construct
  source 1..12: note = 1D7B4[NKG2D]_H1.41 - vhCDR3
GIFSIYLFYFDY

SEQ ID NO: 1293 - protein, 121 aa, synthetic construct
  source 1..121: note = 1D7B4[NKG2D]_H1.42 - Variable heavy (vh) domain
EVQLLESGGGLVQPGGSLRLSCAASGFTFSSYAMSWVRQAPGKGLEWVSSISASGGSTYYADSVKGRFTISRDNSKNTLYLQMNSLRAEDTAVYYCAKGIFSIYFHYFDYWGQGTLVTVSS

SEQ ID NO: 1294 - protein, 12 aa, synthetic construct
  source 1..12: note = 1D7B4[NKG2D]_H1.42 - vhCDR3
GIFSIYFHYFDY

SEQ ID NO: 1295 - protein, 121 aa, synthetic construct
  source 1..121: note = 1D7B4[NKG2D]_H1.43 - Variable heavy (vh) domain
EVQLLESGGGLVQPGGSLRLSCAASGFTFSSYAMSWVRQAPGKGLEWVSSISASGGSTYYADSVKGRFTISRDNSKNTLYLQMNSLRAEDTAVYYCAKGIFSIYFAYFDYWGQGTLVTVSS

SEQ ID NO: 1296 - protein, 12 aa, synthetic construct
  source 1..12: note = 1D7B4[NKG2D]_H1.43 - vhCDR3
GIFSIYFAYFDY

SEQ ID NO: 1297 - protein, 121 aa, synthetic construct
  source 1..121: note = 1D7B4[NKG2D]_H1.44 - Variable heavy (vh) domain
EVQLLESGGGLVQPGGSLRLSCAASGFTFSSYAMSWVRQAPGKGLEWVSSISASGGSTYYADSVKGRFTISRDNSKNTLYLQMNSLRAEDTAVYYCAKGIFSIYFSYFDYWGQGTLVTVSS

SEQ ID NO: 1298 - protein, 12 aa, synthetic construct
  source 1..12: note = 1D7B4[NKG2D]_H1.44 - vhCDR3
GIFSIYFSYFDY

SEQ ID NO: 1299 - protein, 121 aa, synthetic construct
  source 1..121: note = 1D7B4[NKG2D]_H1.45 - Variable heavy (vh) domain
EVQLLESGGGLVQPGGSLRLSCAASGFTFSSYAMSWVRQAPGKGLEWVSSISASGGSTYYADSVKGRFTISRDNSKNTLYLQMNSLRAEDTAVYYCAKGIFSIYFEYFDYWGQGTLVTVSS

SEQ ID NO: 1300 - protein, 12 aa, synthetic construct
  source 1..12: note = 1D7B4[NKG2D]_H1.45 - vhCDR3
GIFSIYFEYFDY

SEQ ID NO: 1301 - protein, 121 aa, synthetic construct
  source 1..121: note = 1D7B4[NKG2D]_H1.46 - Variable heavy (vh) domain
EVQLLESGGGLVQPGGSLRLSCAASGFTFSSYAMSWVRQAPGKGLEWVSSISASGGSTYYADSVKGRFTISRDNSKNTLYLQMNSLRAEDTAVYYCAKGIFSIYFQYFDYWGQGTLVTVSS

SEQ ID NO: 1302 - protein, 12 aa, synthetic construct
  source 1..12: note = 1D7B4[NKG2D]_H1.46 - vhCDR3
GIFSIYFQYFDY

SEQ ID NO: 1303 - protein, 121 aa, synthetic construct
  source 1..121: note = 1D7B4[NKG2D]_H1.47 - Variable heavy (vh) domain
EVQLLESGGGLVQPGGSLRLSCAASGFTFSSYAMSWVRQAPGKGLEWVSSISASGGSTYYADSVKGRFTISRDNSKNTLYLQMNSLRAEDTAVYYCAKGIFSIYFLYFDYWGQGTLVTVSS

SEQ ID NO: 1304 - protein, 12 aa, synthetic construct
  source 1..12: note = 1D7B4[NKG2D]_H1.47 - vhCDR3
GIFSIYFLYFDY

SEQ ID NO: 1305 - protein, 121 aa, synthetic construct
  source 1..121: note = 1D7B4[NKG2D]_H1.48 - Variable heavy (vh) domain
EVQLLESGGGLVQPGGSLRLSCAASGFTFSSYAMSWVRQAPGKGLEWVSSISASGGSTYYADSVKGRFTISRDNSKNTLYLQMNSLRAEDTAVYYCAKGIFSIYFFYHDYWGQGTLVTVSS

SEQ ID NO: 1306 - protein, 12 aa, synthetic construct
  source 1..12: note = 1D7B4[NKG2D]_H1.48 - vhCDR3
GIFSIYFFYHDY

SEQ ID NO: 1307 - protein, 447 aa, synthetic construct; identical to SEQ ID NO: 988
  source 1..447: note = XENP42652 Chain 1-38E2[B7H3]_H2_Fab-IgG1_pI(-)_Isosteric_A_L368D/K370S

SEQ ID NO: 1308 - protein, 480 aa, synthetic construct
  source 1..480: note = XENP42652 Chain 2-1D7B4[NKG2D]_H1.3_L1_scFv(GKPGS)4-Fc(216)_IgG1_C220S/S364 K/E357Q
EVQLLESGGGLVQPGGSLRLSCAASGFTFSSSAMSWVRQAPGKGLEWVSSISASGGSTYYADSVKGRFTISRDNSKNTLYLQMNSLRAEDTAVYYCAKGIFSIYFFYFDYWGQGTLVTVSSGKPGSGKPGSGKPGSGKPGSDIQMTQSPSSLSASVGDRVTITCRASQSISSYLNWYQQKPGKAPKLLIYAASSLQSGVPSRFSGSGSGTDFTLTISSLQPEDFATYYCQQSYSTPYTFGQGTKLEIKEPKSSDKTHTCPPCPAPELLGGPSVFLFPPKPKDTLMISRTPEVTCVVVDVSHEDPEVKFNWYVDGVEVHNAKTKPREEQYNSTYRVVSVLTVLHQDWLNGKEYKCKVSNKALPAPIEKTISKAKGQPREPQVYTLPPSREQMTKNQVKLTCLVKGFYPSDIAVEWESNGQPENNYKTTPPVLDSDGSFFLYSKLTVDKSRWQQGNVFSCSVMHEALHNHYTQKSLSLSPGK

SEQ ID NO: 1309 - protein, 447 aa, synthetic construct; identical to SEQ ID NO: 988
  source 1..447: note = XENP42653 Chain 1-38E2[B7H3]_H2_Fab-IgG1_pI(-)_Isosteric_A_L368D/K370S

SEQ ID NO: 1310 - protein, 480 aa, synthetic construct
  source 1..480: note = XENP42653 Chain 2-1D7B4[NKG2D]_H1.23_L1_scFv(GKPGS)4-Fc(216)_IgG1_C220S/S36 4K/E357Q
EVQLLESGGGLVQPGGSLRLSCAASGFTFSSYAMSWVRQAPGKGLEWVSSISASGGSTYYADSVKGRFTISRDNSKNTLYLQMNSLRAEDTAVYYCAKGIFAIYFFYFDYWGQGTLVTVSSGKPGSGKPGSGKPGSGKPGSDIQMTQSPSSLSASVGDRVTITCRASQSISSYLNWYQQKPGKAPKLLIYAASSLQSGVPSRFSGSGSGTDFTLTISSLQPEDFATYYCQQSYSTPYTFGQGTKLEIKEPKSSDKTHTCPPCPAPELLGGPSVFLFPPKPKDTLMISRTPEVTCVVVDVSHEDPEVKFNWYVDGVEVHNAKTKPREEQYNSTYRVVSVLTVLHQDWLNGKEYKCKVSNKALPAPIEKTISKAKGQPREPQVYTLPPSREQMTKNQVKLTCLVKGFYPSDIAVEWESNGQPENNYKTTPPVLDSDGSFFLYSKLTVDKSRWQQGNVFSCSVMHEALHNHYTQKSLSLSPGK

SEQ ID NO: 1311 - protein, 447 aa, synthetic construct; identical to SEQ ID NO: 988
  source 1..447: note = XENP42654 Chain 1-38E2[B7H3]_H2_Fab-IgG1_pI(-)_Isosteric_A_L368D/K370S

SEQ ID NO: 1312 - protein, 480 aa, synthetic construct
  source 1..480: note = XENP42654 Chain 2-1D7B4[NKG2D]_H1.28_L1_scFv(GKPGS)4-Fc(216)_IgG1_C220S/S36 4K/E357Q
EVQLLESGGGLVQPGGSLRLSCAASGFTFSSYAMSWVRQAPGKGLEWVSSISASGGSTYYADSVKGRFTISRDNSKNTLYLQMNSLRAEDTAVYYCAKGIFSHYFFYFDYWGQGTLVTVSSGKPGSGKPGSGKPGSGKPGSDIQMTQSPSSLSASVGDRVTITCRASQSISSYLNWYQQKPGKAPKLLIYAASSLQSGVPSRFSGSGSGTDFTLTISSLQPEDFATYYCQQSYSTPYTFGQGTKLEIKEPKSSDKTHTCPPCPAPELLGGPSVFLFPPKPKDTLMISRTPEVTCVVVDVSHEDPEVKFNWYVDGVEVHNAKTKPREEQYNSTYRVVSVLTVLHQDWLNGKEYKCKVSNKALPAPIEKTISKAKGQPREPQVYTLPPSREQMTKNQVKLTCLVKGFYPSDIAVEWESNGQPENNYKTTPPVLDSDGSFFLYSKLTVDKSRWQQGNVFSCSVMHEALHNHYTQKSLSLSPGK

SEQ ID NO: 1313 - protein, 447 aa, synthetic construct; identical to SEQ ID NO: 988
  source 1..447: note = XENP42655 Chain 1-38E2[B7H3]_H2_Fab-IgG1_pI(-)_Isosteric_A_L368D/K370S

SEQ ID NO: 1314 - protein, 480 aa, synthetic construct; identical to SEQ ID NO: 1204
  source 1..480: note = XENP42655 Chain 2-1D7B4[NKG2D]_H1.31_L1_scFv(GKPGS)4-Fc(216)_IgG1_C220S/S36 4K/E357Q

SEQ ID NO: 1315 - protein, 447 aa, synthetic construct; identical to SEQ ID NO: 988
  source 1..447: note = XENP42656 Chain 1-38E2[B7H3]_H2_Fab-IgG1_pI(-)_Isosteric_A_L368D/K370S

SEQ ID NO: 1316 - protein, 480 aa, synthetic construct
  source 1..480: note = XENP42656 Chain 2-1D7B4[NKG2D]_H1.33_L1_scFv(GKPGS)4-Fc(216)_IgG1_C220S/S36 4K/E357Q
EVQLLESGGGLVQPGGSLRLSCAASGFTFSSYAMSWVRQAPGKGLEWVSSISASGGSTYYADSVKGRFTISRDNSKNTLYLQMNSLRAEDTAVYYCAKGIFSIEFFYFDYWGQGTLVTVSSGKPGSGKPGSGKPGSGKPGSDIQMTQSPSSLSASVGDRVTITCRASQSISSYLNWYQQKPGKAPKLLIYAASSLQSGVPSRFSGSGSGTDFTLTISSLQPEDFATYYCQQSYSTPYTFGQGTKLEIKEPKSSDKTHTCPPCPAPELLGGPSVFLFPPKPKDTLMISRTPEVTCVVVDVSHEDPEVKFNWYVDGVEVHNAKTKPREEQYNSTYRVVSVLTVLHQDWLNGKEYKCKVSNKALPAPIEKTISKAKGQPREPQVYTLPPSREQMTKNQVKLTCLVKGFYPSDIAVEWESNGQPENNYKTTPPVLDSDGSFFLYSKLTVDKSRWQQGNVFSCSVMHEALHNHYTQKSLSLSPGK

SEQ ID NO: 1317 - protein, 444 aa, synthetic construct
  source 1..444: note = XENP24806 Chain 1 - MS[NKG2D]_H0L0_Fab-empty_Fc(216)_IgG1_PVA_/S267K_pI(-)_Isos teric_A_L368D/K370S-IgG1_ISO(+RR)_C220S/S364K/E357Q
QVHLQESGPGLVKPSETLSLTCTVSDDSISSYYWSWIRQPPGKGLEWIGHISYSGSANYNPSLKSRVTISVDTSKNQFSLKLSSVTAADTAVYYCANWDDAFNIWGQGTMVTVSSASTKGPSVFPLAPSSKSTSGGTAALGCLVKDYFPEPVTVSWNSGALTSGVHTFPAVLQSSGLYSLSSVVTVPSSSLGTQTYICNVNHKPSDTKVDKKVEPKSCDKTHTCPPCPAPPVAGPSVFLFPPKPKDTLMISRTPEVTCVVVDVKHEDPEVKFNWYVDGVEVHNAKTKPREEEYNSTYRVVSVLTVLHQDWLNGKEYKCKVSNKALPAPIEKTISKAKGQPREPQVYTLPPSREEMTKNQVSLTCDVSGFYPSDIAVEWESDGQPENNYKTTPPVLDSDGSFFLYSKLTVDKSRWEQGDVFSCSVMHEALHNHYTQKSLSLSPGK

SEQ ID NO: 1318 - protein, 231 aa, synthetic construct
  source 1..231: note = XENP24806 Chain 2 - MS[NKG2D]_H0L0_Fab-empty_Fc(216)_IgG1_PVA_/S267K_pI(-)_Isos teric_A_L368D/K370S-IgG1_ISO(+RR)_C220S/S364K/E357Q
ERKSSDKTHTCPRCPAPPVAGPSVFLFPPKPKDTLMISRTPEVTCVVVDVKHEDPEVKFKWYVDGVEVHNAKTKPREEQYNSTYRVVSVLTVLHQDWLNGKEYKCKVSNKALPAPIEKTISKAKGQPREPQVYTLPPSREQMTKNQVKLTCLVKGFYPSDIAVEWESNGQPENNYKTTPPVLDSDGSFFLYSKLTVDKSRWQQGNVFSCSVMHEALHNHYTQKSLSLSPGK

SEQ ID NO: 1319 - protein, 215 aa, synthetic construct
  source 1..215: note = XENP24806 Chain 3 - MS[NKG2D]_H0L0_Fab-empty_Fc(216)_IgG1_PVA_/S267K_pI(-)_Isos teric_A_L368D/K370S-IgG1_ISO(+RR)_C220S/S364K/E357Q
EIVLTQSPGTLSLSPGERATLSCRASQSVSSSYLAWYQQKPGQAPRLLIYGASSRATGIPDRFSGSGSGTDFTLTISRLEPEDFAVYYCQQYGSSPWTFGQGTKVEIKRTVAAPSVFIFPPSDEQLKSGTASVVCLLNNFYPREAKVQWKVDNALQSGNSQESVTEQDSKDSTYSLSSTLTLSKADYEKHKVYACEVTHQGLSSPVTKSFNRGEC

SEQ ID NO: 1320 - protein, 449 aa, synthetic construct
  source 1..449: note = XENP27046 Chain 1 - 1A7A5[NKG2D]_H1L1_IgG1_PVA_/S267K
EVQLLESGGGLVQPGGSLRLSCAASGFTFSSYAMSWVRQAPGKGLEWVSAISGTGSSTYYADSVKGRFTISRDNSKNTLYLQMNSLRAEDTAVYYCAKVTFVQTDIFDYWGQGTLVTVSSASTKGPSVFPLAPSSKSTSGGTAALGCLVKDYFPEPVTVSWNSGALTSGVHTFPAVLQSSGLYSLSSVVTVPSSSLGTQTYICNVNHKPSNTKVDKKVEPKSCDKTHTCPPCPAPPVAGPSVFLFPPKPKDTLMISRTPEVTCVVVDVKHEDPEVKFNWYVDGVEVHNAKTKPREEQYNSTYRVVSVLTVLHQDWLNGKEYKCKVSNKALPAPIEKTISKAKGQPREPQVYTLPPSREEMTKNQVSLTCLVKGFYPSDIAVEWESNGQPENNYKTTPPVLDSDGSFFLYSKLTVDKSRWQQGNVFSCSVMHEALHNHYTQKSLSLSPGK

SEQ ID NO: 1321 - protein, 214 aa, synthetic construct
  source 1..214: note = XENP27046 Chain 2 - 1A7A5[NKG2D]_H1L1_IgG1_PVA_/S267K
DIQMTQSPSSLSASVGDRVTITCRASQSISSYLNWYQQKPGKAPKLLIYAASSLQSGVPSRFSGSGSGTDFTLTISSLQPEDFATYYCQQSYSLPLTFGQGTKLEIKRTVAAPSVFIFPPSDEQLKSGTASVVCLLNNFYPREAKVQWKVDNALQSGNSQESVTEQDSKDSTYSLSSTLTLSKADYEKHKVYACEVTHQGLSSPVTKSFNRGEC

SEQ ID NO: 1322 - protein, 447 aa, synthetic construct
  source 1..447: note = XENP27047 Chain 1 - 1A12A5[NKG2D]_H1L1_IgG1_PVA_/S267K
EVQLLESGGGLVQPGGSLRLSCAASGFTFSSYAMSWVRQAPGKGLEWVSAISSSGGGTYYADSVKGRFTISRDNSKNTLYLQMNSLRAEDTAVYYCAKVDGRADFDYWGQGTLVTVSSASTKGPSVFPLAPSSKSTSGGTAALGCLVKDYFPEPVTVSWNSGALTSGVHTFPAVLQSSGLYSLSSVVTVPSSSLGTQTYICNVNHKPSNTKVDKKVEPKSCDKTHTCPPCPAPPVAGPSVFLFPPKPKDTLMISRTPEVTCVVVDVKHEDPEVKFNWYVDGVEVHNAKTKPREEQYNSTYRVVSVLTVLHQDWLNGKEYKCKVSNKALPAPIEKTISKAKGQPREPQVYTLPPSREEMTKNQVSLTCLVKGFYPSDIAVEWESNGQPENNYKTTPPVLDSDGSFFLYSKLTVDKSRWQQGNVFSCSVMHEALHNHYTQKSLSLSPGK

SEQ ID NO: 1323 - protein, 214 aa, synthetic construct
  source 1..214: note = XENP27047 Chain 2 - 1A12A5[NKG2D]_H1L1_IgG1_PVA_/S267K
DIQMTQSPSSLSASVGDRVTITCRASQSISSYLNWYQQKPGKAPKLLIYAASSLQSGVPSRFSGSGSGTDFTLTISSLQPEDFATYYCQQSSSIPPTFGQGTKLEIKRTVAAPSVFIFPPSDEQLKSGTASVVCLLNNFYPREAKVQWKVDNALQSGNSQESVTEQDSKDSTYSLSSTLTLSKADYEKHKVYACEVTHQGLSSPVTKSFNRGEC

SEQ ID NO: 1324 - protein, 448 aa, synthetic construct
  source 1..448: note = XENP27048 Chain 1 - 2F7A5[NKG2D]_H1L1_IgG1_PVA_/S267K
EVQLLESGGGLVQPGGSLRLSCAASGFTFSSYAMSWVRQAPGKGLEWVSAISGSGTYYADSVKGRFTISRDNSKNTLYLQMNSLRAEDTAVYYCAKEPYSYGLSYFDYWGQGTLVTVSSASTKGPSVFPLAPSSKSTSGGTAALGCLVKDYFPEPVTVSWNSGALTSGVHTFPAVLQSSGLYSLSSVVTVPSSSLGTQTYICNVNHKPSNTKVDKKVEPKSCDKTHTCPPCPAPPVAGPSVFLFPPKPKDTLMISRTPEVTCVVVDVKHEDPEVKFNWYVDGVEVHNAKTKPREEQYNSTYRVVSVLTVLHQDWLNGKEYKCKVSNKALPAPIEKTISKAKGQPREPQVYTLPPSREEMTKNQVSLTCLVKGFYPSDIAVEWESNGQPENNYKTTPPVLDSDGSFFLYSKLTVDKSRWQQGNVFSCSVMHEALHNHYTQKSLSLSPGK

SEQ ID NO: 1325 - protein, 214 aa, synthetic construct
  source 1..214: note = XENP27048 Chain 2 - 2F7A5[NKG2D]_H1L1_IgG1_PVA_/S267K
DIQMTQSPSSLSASVGDRVTITCRASQSISSYLNWYQQKPGKAPKLLIYAASSLQSGVPSRFSGSGSGTDFTLTISSLQPEDFATYYCQQSYSTPRTFGQGTKLEIKRTVAAPSVFIFPPSDEQLKSGTASVVCLLNNFYPREAKVQWKVDNALQSGNSQESVTEQDSKDSTYSLSSTLTLSKADYEKHKVYACEVTHQGLSSPVTKSFNRGEC

SEQ ID NO: 1326 - protein, 450 aa, synthetic construct
  source 1..450: note = XENP27049 Chain 1 - 2F7A5n[NKG2D]_H1L1_IgG1_PVA_/S267K
EVQLLESGGGLVQPGGSLRLSCAASGFTFSSYAMSWVRQAPGKGLEWVSAISSTGGSTYYADSVKGRFTISRDNSKNTLYLQMNSLRAEDTAVYYCAKEPYSYGLSYFDYWGQGTLVTVSSASTKGPSVFPLAPSSKSTSGGTAALGCLVKDYFPEPVTVSWNSGALTSGVHTFPAVLQSSGLYSLSSVVTVPSSSLGTQTYICNVNHKPSNTKVDKKVEPKSCDKTHTCPPCPAPPVAGPSVFLFPPKPKDTLMISRTPEVTCVVVDVKHEDPEVKFNWYVDGVEVHNAKTKPREEQYNSTYRVVSVLTVLHQDWLNGKEYKCKVSNKALPAPIEKTISKAKGQPREPQVYTLPPSREEMTKNQVSLTCLVKGFYPSDIAVEWESNGQPENNYKTTPPVLDSDGSFFLYSKLTVDKSRWQQGNVFSCSVMHEALHNHYTQKSLSLSPGK

SEQ ID NO: 1327 - protein, 214 aa, synthetic construct; identical to SEQ ID NO: 1325
  source 1..214: note = XENP27049 Chain 2 - 2F7A5n[NKG2D]_H1L1_IgG1_PVA_/S267K

SEQ ID NO: 1328 - protein, 449 aa, synthetic construct
  source 1..449: note = XENP27050 Chain 1 - 2G10A5[NKG2D]_H1L1_IgG1_PVA_/S267K
EVQLLESGGGLVQPGGSLRLSCAASGFTFSSYAMSWVRQAPGKGLEWVSGISGSGGSTYYADSVKGRFTISRDNSKNTLYLQMNSLRAEDTAVYYCAKLRPYPDAYFDYWGQGTLVTVSSASTKGPSVFPLAPSSKSTSGGTAALGCLVKDYFPEPVTVSWNSGALTSGVHTFPAVLQSSGLYSLSSVVTVPSSSLGTQTYICNVNHKPSNTKVDKKVEPKSCDKTHTCPPCPAPPVAGPSVFLFPPKPKDTLMISRTPEVTCVVVDVKHEDPEVKFNWYVDGVEVHNAKTKPREEQYNSTYRVVSVLTVLHQDWLNGKEYKCKVSNKALPAPIEKTISKAKGQPREPQVYTLPPSREEMTKNQVSLTCLVKGFYPSDIAVEWESNGQPENNYKTTPPVLDSDGSFFLYSKLTVDKSRWQQGNVFSCSVMHEALHNHYTQKSLSLSPGK

SEQ ID NO: 1329 - protein, 214 aa, synthetic construct
  source 1..214: note = XENP27050 Chain 2 - 2G10A5[NKG2D]_H1L1_IgG1_PVA_/S267K
DIQMTQSPSSLSASVGDRVTITCRASQSISSYLNWYQQKPGKAPKLLIYAASSLQSGVPSRFSGSGSGTDFTLTISSLQPEDFATYYCQQSSSAPITFGQGTKLEIKRTVAAPSVFIFPPSDEQLKSGTASVVCLLNNFYPREAKVQWKVDNALQSGNSQESVTEQDSKDSTYSLSSTLTLSKADYEKHKVYACEVTHQGLSSPVTKSFNRGEC

SEQ ID NO: 1330 - protein, 447 aa, synthetic construct
  source 1..447: note = XENP27051 Chain 1 - 2G8A5[NKG2D]_H1L1_IgG1_PVA_/S267K
EVQLLESGGGLVQPGGSLRLSCAASGFTFSSYAMSWVRQAPGKGLEWVSAISSSGGSTYYADSVKGRFTISRDNSKNTLYLQMNSLRAEDTAVYYCAKVRYRVDFDYWGQGTLVTVSSASTKGPSVFPLAPSSKSTSGGTAALGCLVKDYFPEPVTVSWNSGALTSGVHTFPAVLQSSGLYSLSSVVTVPSSSLGTQTYICNVNHKPSNTKVDKKVEPKSCDKTHTCPPCPAPPVAGPSVFLFPPKPKDTLMISRTPEVTCVVVDVKHEDPEVKFNWYVDGVEVHNAKTKPREEQYNSTYRVVSVLTVLHQDWLNGKEYKCKVSNKALPAPIEKTISKAKGQPREPQVYTLPPSREEMTKNQVSLTCLVKGFYPSDIAVEWESNGQPENNYKTTPPVLDSDGSFFLYSKLTVDKSRWQQGNVFSCSVMHEALHNHYTQKSLSLSPGK

SEQ ID NO: 1331 - protein, 214 aa, synthetic construct
  source 1..214: note = XENP27051 Chain 2 - 2G8A5[NKG2D]_H1L1_IgG1_PVA_/S267K
DIQMTQSPSSLSASVGDRVTITCRASQSISSYLNWYQQKPGKAPKLLIYAASSLQSGVPSRFSGSGSGTDFTLTISSLQPEDFATYYCQQSYSTPPTFGQGTKLEIKRTVAAPSVFIFPPSDEQLKSGTASVVCLLNNFYPREAKVQWKVDNALQSGNSQESVTEQDSKDSTYSLSSTLTLSKADYEKHKVYACEVTHQGLSSPVTKSFNRGEC

SEQ ID NO: 1332 - protein, 447 aa, synthetic construct
  source 1..447: note = XENP27052 Chain 1 - 2G7A5[NKG2D]_H1L1_IgG1_PVA_/S267K
EVQLLESGGGLVQPGGSLRLSCAASGFTFSSYAMSWVRQAPGKGLEWVSAISGSGSSTYYADSVKGRFTISRDNSKNTLYLQMNSLRAEDTAVYYCAKVVGRLEFDYWGQGTLVTVSSASTKGPSVFPLAPSSKSTSGGTAALGCLVKDYFPEPVTVSWNSGALTSGVHTFPAVLQSSGLYSLSSVVTVPSSSLGTQTYICNVNHKPSNTKVDKKVEPKSCDKTHTCPPCPAPPVAGPSVFLFPPKPKDTLMISRTPEVTCVVVDVKHEDPEVKFNWYVDGVEVHNAKTKPREEQYNSTYRVVSVLTVLHQDWLNGKEYKCKVSNKALPAPIEKTISKAKGQPREPQVYTLPPSREEMTKNQVSLTCLVKGFYPSDIAVEWESNGQPENNYKTTPPVLDSDGSFFLYSKLTVDKSRWQQGNVFSCSVMHEALHNHYTQKSLSLSPGK

SEQ ID NO: 1333 - protein, 214 aa, synthetic construct; identical to SEQ ID NO: 1331
  source 1..214: note = XENP27052 Chain 2 - 2G7A5[NKG2D]_H1L1_IgG1_PVA_/S267K

SEQ ID NO: 1334 - protein, 450 aa, synthetic construct
  source 1..450: note = XENP27053 Chain 1 - 1F10B3[NKG2D]_H1L1_IgG1_PVA_/S267K
EVQLLESGGGLVQPGGSLRLSCAASGFTFSSYAMSWVRQAPGKGLEWVSAISGSGGSTYYADSVKGRFTISRDNSKNTLYLQMNSLRAEDTAVYYCAKGPFSQWLSYFDYWGQGTLVTVSSASTKGPSVFPLAPSSKSTSGGTAALGCLVKDYFPEPVTVSWNSGALTSGVHTFPAVLQSSGLYSLSSVVTVPSSSLGTQTYICNVNHKPSNTKVDKKVEPKSCDKTHTCPPCPAPPVAGPSVFLFPPKPKDTLMISRTPEVTCVVVDVKHEDPEVKFNWYVDGVEVHNAKTKPREEQYNSTYRVVSVLTVLHQDWLNGKEYKCKVSNKALPAPIEKTISKAKGQPREPQVYTLPPSREEMTKNQVSLTCLVKGFYPSDIAVEWESNGQPENNYKTTPPVLDSDGSFFLYSKLTVDKSRWQQGNVFSCSVMHEALHNHYTQKSLSLSPGK

SEQ ID NO: 1335 - protein, 214 aa, synthetic construct; identical to SEQ ID NO: 3
  source 1..214: note = XENP27053 Chain 2 - 1F10B3[NKG2D]_H1L1_IgG1_PVA_/S267K

SEQ ID NO: 1336 - protein, 450 aa, synthetic construct
  source 1..450: note = XENP27054 Chain 1 - 1D2B4[NKG2D]_H1L1_IgG1_PVA_/S267K
EVQLLESGGGLVQPGGSLRLSCAASGFTFSSFGMSWVRQAPGKGLEWVSTISGSGSTTYYADSVKGRFTISRDNSKNTLYLQMNSLRAEDTAVYYCAKGVFSEWHYYFDYWGQGTLVTVSSASTKGPSVFPLAPSSKSTSGGTAALGCLVKDYFPEPVTVSWNSGALTSGVHTFPAVLQSSGLYSLSSVVTVPSSSLGTQTYICNVNHKPSNTKVDKKVEPKSCDKTHTCPPCPAPPVAGPSVFLFPPKPKDTLMISRTPEVTCVVVDVKHEDPEVKFNWYVDGVEVHNAKTKPREEQYNSTYRVVSVLTVLHQDWLNGKEYKCKVSNKALPAPIEKTISKAKGQPREPQVYTLPPSREEMTKNQVSLTCLVKGFYPSDIAVEWESNGQPENNYKTTPPVLDSDGSFFLYSKLTVDKSRWQQGNVFSCSVMHEALHNHYTQKSLSLSPGK

SEQ ID NO: 1337 - protein, 214 aa, synthetic construct; identical to SEQ ID NO: 3
  source 1..214: note = XENP27054 Chain 2 - 1D2B4[NKG2D]_H1L1_IgG1_PVA_/S267K

SEQ ID NO: 1338 - protein, 450 aa, synthetic construct
  source 1..450: note = XENP27055 Chain 1 - 1D7B4[NKG2D]_H1L1_IgG1_PVA_/S267K
EVQLLESGGGLVQPGGSLRLSCAASGFTFSSYAMSWVRQAPGKGLEWVSSISASGGSTYYADSVKGRFTISRDNSKNTLYLQMNSLRAEDTAVYYCAKGIFSIYFFYFDYWGQGTLVTVSSASTKGPSVFPLAPSSKSTSGGTAALGCLVKDYFPEPVTVSWNSGALTSGVHTFPAVLQSSGLYSLSSVVTVPSSSLGTQTYICNVNHKPSNTKVDKKVEPKSCDKTHTCPPCPAPPVAGPSVFLFPPKPKDTLMISRTPEVTCVVVDVKHEDPEVKFNWYVDGVEVHNAKTKPREEQYNSTYRVVSVLTVLHQDWLNGKEYKCKVSNKALPAPIEKTISKAKGQPREPQVYTLPPSREEMTKNQVSLTCLVKGFYPSDIAVEWESNGQPENNYKTTPPVLDSDGSFFLYSKLTVDKSRWQQGNVFSCSVMHEALHNHYTQKSLSLSPGK

SEQ ID NO: 1339 - protein, 214 aa, synthetic construct; identical to SEQ ID NO: 3
  source 1..214: note = XENP27055 Chain 2 - 1D7B4[NKG2D]_H1L1_IgG1_PVA_/S267K

SEQ ID NO: 1340 - protein, 449 aa, synthetic construct
  source 1..449: note = XENP27056 Chain 1 - 1B2A5[NKG2D]_H1L1_IgG1_PVA_/S267K
EVQLLESGGGLVQPGGSLRLSCAASGFTFSSYAMSWVRQAPGKGLEWVSAISAGGGSTYYADSVKGRFTISRDNSKNTLYLQMNSLRAEDTAVYYCAKVSYAGVDLFDYWGQGTLVTVSSASTKGPSVFPLAPSSKSTSGGTAALGCLVKDYFPEPVTVSWNSGALTSGVHTFPAVLQSSGLYSLSSVVTVPSSSLGTQTYICNVNHKPSNTKVDKKVEPKSCDKTHTCPPCPAPPVAGPSVFLFPPKPKDTLMISRTPEVTCVVVDVKHEDPEVKFNWYVDGVEVHNAKTKPREEQYNSTYRVVSVLTVLHQDWLNGKEYKCKVSNKALPAPIEKTISKAKGQPREPQVYTLPPSREEMTKNQVSLTCLVKGFYPSDIAVEWESNGQPENNYKTTPPVLDSDGSFFLYSKLTVDKSRWQQGNVFSCSVMHEALHNHYTQKSLSLSPGK

SEQ ID NO: 1341 - protein, 214 aa, synthetic construct
  source 1..214: note = XENP27056 Chain 2 - 1B2A5[NKG2D]_H1L1_IgG1_PVA_/S267K
DIQMTQSPSSLSASVGDRVTITCRASQSISSYLNWYQQKPGKAPKLLIYAASSLQSGVPSRFSGSGSGTDFTLTISSLQPEDFATYYCQQSYSIPLTFGQGTKLEIKRTVAAPSVFIFPPSDEQLKSGTASVVCLLNNFYPREAKVQWKVDNALQSGNSQESVTEQDSKDSTYSLSSTLTLSKADYEKHKVYACEVTHQGLSSPVTKSFNRGEC

SEQ ID NO: 1342 - protein, 448 aa, synthetic construct
  source 1..448: note = XENP27057 Chain 1 - 1H12A3[NKG2D]_H1L1_IgG1_PVA_/S267K
EVQLLESGGGLVQPGGSLRLSCAASGFTFSSYAMSWVRQAPGKGLEWVSAISGSGGSTYYADSVKGRFTISRDNSKNTLYLQMNSLRAEDTAVYYCAKVVGPGAIFDYWGQGTLVTVSSASTKGPSVFPLAPSSKSTSGGTAALGCLVKDYFPEPVTVSWNSGALTSGVHTFPAVLQSSGLYSLSSVVTVPSSSLGTQTYICNVNHKPSNTKVDKKVEPKSCDKTHTCPPCPAPPVAGPSVFLFPPKPKDTLMISRTPEVTCVVVDVKHEDPEVKFNWYVDGVEVHNAKTKPREEQYNSTYRVVSVLTVLHQDWLNGKEYKCKVSNKALPAPIEKTISKAKGQPREPQVYTLPPSREEMTKNQVSLTCLVKGFYPSDIAVEWESNGQPENNYKTTPPVLDSDGSFFLYSKLTVDKSRWQQGNVFSCSVMHEALHNHYTQKSLSLSPGK

SEQ ID NO: 1343 - protein, 214 aa, synthetic construct
  source 1..214: note = XENP27057 Chain 2 - 1H12A3[NKG2D]_H1L1_IgG1_PVA_/S267K
DIQMTQSPSSLSASVGDRVTITCRASQSISSYLNWYQQKPGKAPKLLIYAASSLQSGVPSRFSGSGSGTDFTLTISSLQPEDFATYYCQQSYSTPITFGQGTKLEIKRTVAAPSVFIFPPSDEQLKSGTASVVCLLNNFYPREAKVQWKVDNALQSGNSQESVTEQDSKDSTYSLSSTLTLSKADYEKHKVYACEVTHQGLSSPVTKSFNRGEC

SEQ ID NO: 1344 - protein, 447 aa, synthetic construct
  source 1..447: note = XENP27058 Chain 1 - 2A4A5[NKG2D]_H1L1_IgG1_PVA_/S267K
EVQLLESGGGLVQPGGSLRLSCAASGFTFSSYAMSWVRQAPGKGLEWVSAISGSGGRTYYADSVKGRFTISRDNSKNTLYLQMNSLRAEDTAVYYCAKDGPWYDFDYWGQGTLVTVSSASTKGPSVFPLAPSSKSTSGGTAALGCLVKDYFPEPVTVSWNSGALTSGVHTFPAVLQSSGLYSLSSVVTVPSSSLGTQTYICNVNHKPSNTKVDKKVEPKSCDKTHTCPPCPAPPVAGPSVFLFPPKPKDTLMISRTPEVTCVVVDVKHEDPEVKFNWYVDGVEVHNAKTKPREEQYNSTYRVVSVLTVLHQDWLNGKEYKCKVSNKALPAPIEKTISKAKGQPREPQVYTLPPSREEMTKNQVSLTCLVKGFYPSDIAVEWESNGQPENNYKTTPPVLDSDGSFFLYSKLTVDKSRWQQGNVFSCSVMHEALHNHYTQKSLSLSPGK

SEQ ID NO: 1345 - protein, 214 aa, synthetic construct
  source 1..214: note = XENP27058 Chain 2 - 2A4A5[NKG2D]_H1L1_IgG1_PVA_/S267K
DIQMTQSPSSLSASVGDRVTITCRASQSISSYLNWYQQKPGKAPKLLIYAASSLQSGVPSRFSGSGSGTDFTLTISSLQPEDFATYYCQQSYKIPVTFGQGTKLEIKRTVAAPSVFIFPPSDEQLKSGTASVVCLLNNFYPREAKVQWKVDNALQSGNSQESVTEQDSKDSTYSLSSTLTLSKADYEKHKVYACEVTHQGLSSPVTKSFNRGEC

SEQ ID NO: 1346 - protein, 450 aa, synthetic construct
  source 1..450: note = XENP27059 Chain 1 - 1C10A4[NKG2D]_H1L1_IgG1_PVA_/S267K
EVQLLESGGGLVQPGGSLRLSCAASGFTFSSYAMSWVRQAPGKGLEWVSAISASGDTTFYADSVKGRFTISRDNSKNTLYLQMNSLRAEDTAVYYCAKSPFSQWAYYFDYWGQGTLVTVSSASTKGPSVFPLAPSSKSTSGGTAALGCLVKDYFPEPVTVSWNSGALTSGVHTFPAVLQSSGLYSLSSVVTVPSSSLGTQTYICNVNHKPSNTKVDKKVEPKSCDKTHTCPPCPAPPVAGPSVFLFPPKPKDTLMISRTPEVTCVVVDVKHEDPEVKFNWYVDGVEVHNAKTKPREEQYNSTYRVVSVLTVLHQDWLNGKEYKCKVSNKALPAPIEKTISKAKGQPREPQVYTLPPSREEMTKNQVSLTCLVKGFYPSDIAVEWESNGQPENNYKTTPPVLDSDGSFFLYSKLTVDKSRWQQGNVFSCSVMHEALHNHYTQKSLSLSPGK

SEQ ID NO: 1347 - protein, 214 aa, synthetic construct
  source 1..214: note = XENP27059 Chain 2 - 1C10A4[NKG2D]_H1L1_IgG1_PVA_/S267K
DIQMTQSPSSLSASVGDRVTITCRASQSISSYLNWYQQKPGKAPKLLIYAASSLQSGVPSRFSGSGSGTDFTLTISSLQPEDFATYYCQQSYSPPYTFGQGTKLEIKRTVAAPSVFIFPPSDEQLKSGTASVVCLLNNFYPREAKVQWKVDNALQSGNSQESVTEQDSKDSTYSLSSTLTLSKADYEKHKVYACEVTHQGLSSPVTKSFNRGEC

SEQ ID NO: 1348 - protein, 448 aa, synthetic construct
  source 1..448: note = XENP27060 Chain 1 - 2A12A5[NKG2D]_H1L1_IgG1_PVA_/S267K
EVQLLESGGGLVQPGGSLRLSCAASGFTFSSYAMSWVRQAPGKGLEWVSAISGSGASTYYADSVKGRFTISRDNSKNTLYLQMNSLRAEDTAVYYCAKGFGRLPLFDYWGQGTLVTVSSASTKGPSVFPLAPSSKSTSGGTAALGCLVKDYFPEPVTVSWNSGALTSGVHTFPAVLQSSGLYSLSSVVTVPSSSLGTQTYICNVNHKPSNTKVDKKVEPKSCDKTHTCPPCPAPPVAGPSVFLFPPKPKDTLMISRTPEVTCVVVDVKHEDPEVKFNWYVDGVEVHNAKTKPREEQYNSTYRVVSVLTVLHQDWLNGKEYKCKVSNKALPAPIEKTISKAKGQPREPQVYTLPPSREEMTKNQVSLTCLVKGFYPSDIAVEWESNGQPENNYKTTPPVLDSDGSFFLYSKLTVDKSRWQQGNVFSCSVMHEALHNHYTQKSLSLSPGK

SEQ ID NO: 1349 - protein, 214 aa, synthetic construct
  source 1..214: note = XENP27060 Chain 2 - 2A12A5[NKG2D]_H1L1_IgG1_PVA_/S267K
DIQMTQSPSSLSASVGDRVTITCRASQSISSYLNWYQQKPGKAPKLLIYAASSLQSGVPSRFSGSGSGTDFTLTISSLQPEDFATYYCQQSFSTPYTFGQGTKLEIKRTVAAPSVFIFPPSDEQLKSGTASVVCLLNNFYPREAKVQWKVDNALQSGNSQESVTEQDSKDSTYSLSSTLTLSKADYEKHKVYACEVTHQGLSSPVTKSFNRGEC

SEQ ID NO: 1350 - protein, 447 aa, synthetic construct
  source 1..447: note = XENP27061 Chain 1 - 2F9A5[NKG2D]_H1L1_IgG1_PVA_/S267K
EVQLLESGGGLVQPGGSLRLSCAASGFTFSSYAMSWVRQAPGKGLEWVSAISGSGGSTYYADSVKGRFTISRDNSKNTLYLQMNSLRAEDTAVYYCAKVSGSIDFDYWGQGTLVTVSSASTKGPSVFPLAPSSKSTSGGTAALGCLVKDYFPEPVTVSWNSGALTSGVHTFPAVLQSSGLYSLSSVVTVPSSSLGTQTYICNVNHKPSNTKVDKKVEPKSCDKTHTCPPCPAPPVAGPSVFLFPPKPKDTLMISRTPEVTCVVVDVKHEDPEVKFNWYVDGVEVHNAKTKPREEQYNSTYRVVSVLTVLHQDWLNGKEYKCKVSNKALPAPIEKTISKAKGQPREPQVYTLPPSREEMTKNQVSLTCLVKGFYPSDIAVEWESNGQPENNYKTTPPVLDSDGSFFLYSKLTVDKSRWQQGNVFSCSVMHEALHNHYTQKSLSLSPGK

SEQ ID NO: 1351 - protein, 214 aa, synthetic construct
  source 1..214: note = XENP27061 Chain 2 - 2F9A5[NKG2D]_H1L1_IgG1_PVA_/S267K
DIQMTQSPSSLSASVGDRVTITCRASQSISSYLNWYQQKPGKAPKLLIYAASSLQSGVPSRFSGSGSGTDFTLTISSLQPEDFATYYCQQSYSIPPTFGQGTKLEIKRTVAAPSVFIFPPSDEQLKSGTASVVCLLNNFYPREAKVQWKVDNALQSGNSQESVTEQDSKDSTYSLSSTLTLSKADYEKHKVYACEVTHQGLSSPVTKSFNRGEC

SEQ ID NO: 1352 - protein, 448 aa, synthetic construct
  source 1..448: note = XENP27062 Chain 1 - 1G4A5[NKG2D]_H1L1_IgG1_PVA_/S267K
EVQLLESGGGLVQPGGSLRLSCAASGFTFSSYAMSWVRQAPGKGLEWVSTISGSGSTTYYADSVKGRFTISRDNSKNTLYLQMNSLRAEDTAVYYCAKVHRFRYGFDYWGQGTLVTVSSASTKGPSVFPLAPSSKSTSGGTAALGCLVKDYFPEPVTVSWNSGALTSGVHTFPAVLQSSGLYSLSSVVTVPSSSLGTQTYICNVNHKPSNTKVDKKVEPKSCDKTHTCPPCPAPPVAGPSVFLFPPKPKDTLMISRTPEVTCVVVDVKHEDPEVKFNWYVDGVEVHNAKTKPREEQYNSTYRVVSVLTVLHQDWLNGKEYKCKVSNKALPAPIEKTISKAKGQPREPQVYTLPPSREEMTKNQVSLTCLVKGFYPSDIAVEWESNGQPENNYKTTPPVLDSDGSFFLYSKLTVDKSRWQQGNVFSCSVMHEALHNHYTQKSLSLSPGK

SEQ ID NO: 1353 - protein, 214 aa, synthetic construct
  source 1..214: note = XENP27062 Chain 2 - 1G4A5[NKG2D]_H1L1_IgG1_PVA_/S267K
DIQMTQSPSSLSASVGDRVTITCRASQSISSYLNWYQQKPGKAPKLLIYAASSLQSGVPSRFSGSGSGTDFTLTISSLQPEDFATYYCQQTYRVPGTFGQGTKLEIKRTVAAPSVFIFPPSDEQLKSGTASVVCLLNNFYPREAKVQWKVDNALQSGNSQESVTEQDSKDSTYSLSSTLTLSKADYEKHKVYACEVTHQGLSSPVTKSFNRGEC

SEQ ID NO: 1354 - protein, 448 aa, synthetic construct
  source 1..448: note = XENP27063 Chain 1 - 2C7B3[NKG2D]_H1L1_IgG1_PVA_/S267K
EVQLLESGGGLVQPGGSLRLSCAASGFTFSSYAMSWVRQAPGKGLEWVSAISGSGGTTYYADSVKGRFTISRDNSKNTLYLQMNSLRAEDTAVYYCAKVSGPGAQFDYWGQGTLVTVSSASTKGPSVFPLAPSSKSTSGGTAALGCLVKDYFPEPVTVSWNSGALTSGVHTFPAVLQSSGLYSLSSVVTVPSSSLGTQTYICNVNHKPSNTKVDKKVEPKSCDKTHTCPPCPAPPVAGPSVFLFPPKPKDTLMISRTPEVTCVVVDVKHEDPEVKFNWYVDGVEVHNAKTKPREEQYNSTYRVVSVLTVLHQDWLNGKEYKCKVSNKALPAPIEKTISKAKGQPREPQVYTLPPSREEMTKNQVSLTCLVKGFYPSDIAVEWESNGQPENNYKTTPPVLDSDGSFFLYSKLTVDKSRWQQGNVFSCSVMHEALHNHYTQKSLSLSPGK

SEQ ID NO: 1355 - protein, 214 aa, synthetic construct; identical to SEQ ID NO: 3
  source 1..214: note = XENP27063 Chain 2 - 2C7B3[NKG2D]_H1L1_IgG1_PVA_/S267K

SEQ ID NO: 1356 - protein, 450 aa, synthetic construct
  source 1..450: note = XENP27229 Chain 1 - 1D2B4[NKG2D]_H1L1_Fab-huIL10_huIL10_(G4S)2-IgG1_pI(-)_Isost eric_A_PVA_/S267K/L368D/K370S-Fc(216)_IgG1_C220S/PVA_/S267K /S364K/E357Q
EVQLLESGGGLVQPGGSLRLSCAASGFTFSSFGMSWVRQAPGKGLEWVSTISGSGSTTYYADSVKGRFTISRDNSKNTLYLQMNSLRAEDTAVYYCAKGVFSEWHYYFDYWGQGTLVTVSSASTKGPSVFPLAPSSKSTSGGTAALGCLVKDYFPEPVTVSWNSGALTSGVHTFPAVLQSSGLYSLSSVVTVPSSSLGTQTYICNVNHKPSDTKVDKKVEPKSCDKTHTCPPCPAPPVAGPSVFLFPPKPKDTLMISRTPEVTCVVVDVKHEDPEVKFNWYVDGVEVHNAKTKPREEEYNSTYRVVSVLTVLHQDWLNGKEYKCKVSNKALPAPIEKTISKAKGQPREPQVYTLPPSREEMTKNQVSLTCDVSGFYPSDIAVEWESDGQPENNYKTTPPVLDSDGSFFLYSKLTVDKSRWEQGDVFSCSVMHEALHNHYTQKSLSLSPGK

SEQ ID NO: 1357 - protein, 561 aa, synthetic construct
  source 1..561: note = XENP27229 Chain 2 - 1D2B4[NKG2D]_H1L1_Fab-huIL10_huIL10_(G4S)2-IgG1_pI(-)_Isost eric_A_PVA_/S267K/L368D/K370S-Fc(216)_IgG1_C220S/PVA_/S267K /S364K/E357Q
SPGQGTQSENSCTHFPGNLPNMLRDLRDAFSRVKTFFQMKDQLDNLLLKESLLEDFKGYLGCQALSEMIQFYLEEVMPQAENQDPDIKAHVNSLGENLKTLRLRLRRCLRFLPCENKSKAVEQVKNAFNKLQEKGIYKAMSEFDIFINYIEAYMTMKIRNSPGQGTQSENSCTHFPGNLPNMLRDLRDAFSRVKTFFQMKDQLDNLLLKESLLEDFKGYLGCQALSEMIQFYLEEVMPQAENQDPDIKAHVNSLGENLKTLRLRLRRCLRFLPCENKSKAVEQVKNAFNKLQEKGIYKAMSEFDIFINYIEAYMTMKIRNGGGGSGGGGSEPKSSDKTHTCPPCPAPPVAGPSVFLFPPKPKDTLMISRTPEVTCVVVDVKHEDPEVKFNWYVDGVEVHNAKTKPREEQYNSTYRVVSVLTVLHQDWLNGKEYKCKVSNKALPAPIEKTISKAKGQPREPQVYTLPPSREQMTKNQVKLTCLVKGFYPSDIAVEWESNGQPENNYKTTPPVLDSDGSFFLYSKLTVDKSRWQQGNVFSCSVMHEALHNHYTQKSLSLSPGK

SEQ ID NO: 1358 - protein, 214 aa, synthetic construct; identical to SEQ ID NO: 3
  source 1..214: note = XENP27229 Chain 3 - 1D2B4[NKG2D]_H1L1_Fab-huIL10_huIL10_(G4S)2-IgG1_pI(-)_Isost eric_A_PVA_/S267K/L368D/K370S-Fc(216)_IgG1_C220S/PVA_/S267K /S364K/E357Q

SEQ ID NO: 1359 - protein, 450 aa, synthetic construct; identical to SEQ ID NO: 7
  source 1..450: note = XENP27230 Chain 1 - 1D7B4[NKG2D]_H1L1_Fab-huIL10_huIL10_(G4S)2-IgG1_pI(-)_Isost eric_A_PVA_/S267K/L368D/K370S-Fc(216)_IgG1_C220S/PVA_/S267K /S364K/E357Q

SEQ ID NO: 1360 - protein, 561 aa, synthetic construct; identical to SEQ ID NO: 1357
  source 1..561: note = XENP27230 Chain 2 - 1D7B4[NKG2D]_H1L1_Fab-huIL10_huIL10_(G4S)2-IgG1_pI(-)_Isost eric_A_PVA_/S267K/L368D/K370S-Fc(216)_IgG1_C220S/PVA_/S267K /S364K/E357Q

SEQ ID NO: 1361 - protein, 214 aa, synthetic construct; identical to SEQ ID NO: 3
  source 1..214: note = XENP27230 Chain 3 - 1D7B4[NKG2D]_H1L1_Fab-huIL10_huIL10_(G4S)2-IgG1_pI(-)_Isost eric_A_PVA_/S267K/L368D/K370S-Fc(216)_IgG1_C220S/PVA_/S267K /S364K/E357Q

SEQ ID NO: 1362 - protein, 450 aa, synthetic construct
  source 1..450: note = XENP27283 Chain 1 - 1D2B4[NKG2D]_H1.1_L1_IgG1_PVA_/S267K
EVQLLESGGGLVQPGGSLRLSCAASGFTFSSYAMSWVRQAPGKGLEWVSTISGSGSTTYYADSVKGRFTISRDNSKNTLYLQMNSLRAEDTAVYYCAKGVFSEWHYYFDYWGQGTLVTVSSASTKGPSVFPLAPSSKSTSGGTAALGCLVKDYFPEPVTVSWNSGALTSGVHTFPAVLQSSGLYSLSSVVTVPSSSLGTQTYICNVNHKPSNTKVDKKVEPKSCDKTHTCPPCPAPPVAGPSVFLFPPKPKDTLMISRTPEVTCVVVDVKHEDPEVKFNWYVDGVEVHNAKTKPREEQYNSTYRVVSVLTVLHQDWLNGKEYKCKVSNKALPAPIEKTISKAKGQPREPQVYTLPPSREEMTKNQVSLTCLVKGFYPSDIAVEWESNGQPENNYKTTPPVLDSDGSFFLYSKLTVDKSRWQQGNVFSCSVMHEALHNHYTQKSLSLSPGK

SEQ ID NO: 1363 - protein, 214 aa, synthetic construct; identical to SEQ ID NO: 3
  source 1..214: note = XENP27283 Chain 2 - 1D2B4[NKG2D]_H1.1_L1_IgG1_PVA_/S267K

SEQ ID NO: 1364 - protein, 450 aa, synthetic construct
  source 1..450: note = XENP27284 Chain 1 - 2C7B3corr[NKG2D]_H1L1_IgG1_PVA_/S267K
EVQLLESGGGLVQPGGSLRLSCAASGFTFGSYGMSWVRQAPGKGLEWVSAISGSGGSTYYADSVKGRFTISRDNSKNTLYLQMNSLRAEDTAVYYCAKTVFSEWSFYFDYWGQGTLVTVSSASTKGPSVFPLAPSSKSTSGGTAALGCLVKDYFPEPVTVSWNSGALTSGVHTFPAVLQSSGLYSLSSVVTVPSSSLGTQTYICNVNHKPSNTKVDKKVEPKSCDKTHTCPPCPAPPVAGPSVFLFPPKPKDTLMISRTPEVTCVVVDVKHEDPEVKFNWYVDGVEVHNAKTKPREEQYNSTYRVVSVLTVLHQDWLNGKEYKCKVSNKALPAPIEKTISKAKGQPREPQVYTLPPSREEMTKNQVSLTCLVKGFYPSDIAVEWESNGQPENNYKTTPPVLDSDGSFFLYSKLTVDKSRWQQGNVFSCSVMHEALHNHYTQKSLSLSPGK

SEQ ID NO: 1365 - protein, 214 aa, synthetic construct; identical to SEQ ID NO: 3
  source 1..214: note = XENP27284 Chain 2 - 2C7B3corr[NKG2D]_H1L1_IgG1_PVA_/S267K

SEQ ID NO: 1366 - protein, 446 aa, synthetic construct
  source 1..446: note = XENP27591 Chain 1 - 11B2D10[NKG2D]_H0L0_IgG1_PVA_/S267K
QVQLQQSGPELVRPGASVKLSCKASGYTFTSYWMNWVQQRPEQGLEWIGRIDPYDSETHYNQKFKDKAILTVDKSASTAYMQLSSLTSEDSAVYYCAKMGDYSFDYWGQGTTVTVSSASTKGPSVFPLAPSSKSTSGGTAALGCLVKDYFPEPVTVSWNSGALTSGVHTFPAVLQSSGLYSLSSVVTVPSSSLGTQTYICNVNHKPSNTKVDKKVEPKSCDKTHTCPPCPAPPVAGPSVFLFPPKPKDTLMISRTPEVTCVVVDVKHEDPEVKFNWYVDGVEVHNAKTKPREEQYNSTYRVVSVLTVLHQDWLNGKEYKCKVSNKALPAPIEKTISKAKGQPREPQVYTLPPSREEMTKNQVSLTCLVKGFYPSDIAVEWESNGQPENNYKTTPPVLDSDGSFFLYSKLTVDKSRWQQGNVFSCSVMHEALHNHYTQKSLSLSPGK

SEQ ID NO: 1367 - protein, 214 aa, synthetic construct
  source 1..214: note = XENP27591 Chain 2 - 11B2D10[NKG2D]_H0L0_IgG1_PVA_/S267K
DIQLTQSPASLSASVGETVTITCRASGNIHNYLAWYQQKQGKSPQVLVYNAKTLADGVPSRFSGSGSGTQYSLKINSLQPEDFGSYYCQHFWSTTWTFGGGTKLEIKRTVAAPSVFIFPPSDEQLKSGTASVVCLLNNFYPREAKVQWKVDNALQSGNSQESVTEQDSKDSTYSLSSTLTLSKADYEKHKVYACEVTHQGLSSPVTKSFNRGEC

SEQ ID NO: 1368 - protein, 449 aa, synthetic construct
  source 1..449: note = XENP27592 Chain 1 - 6E5A7[NKG2D]_H0L0_IgG1_PVA_/S267K
QVQLQQSGPGLVQPSQSLSITCTVSGFSLTIYGVHWVRQSPGKGLEWLGVIWSGGSTDYNAAFISRLSISKDNSKRQVFFKMSSLQANDTAIYYCSRKSHDGYYGVMDYWGQGTTVTVSSASTKGPSVFPLAPSSKSTSGGTAALGCLVKDYFPEPVTVSWNSGALTSGVHTFPAVLQSSGLYSLSSVVTVPSSSLGTQTYICNVNHKPSNTKVDKKVEPKSCDKTHTCPPCPAPPVAGPSVFLFPPKPKDTLMISRTPEVTCVVVDVKHEDPEVKFNWYVDGVEVHNAKTKPREEQYNSTYRVVSVLTVLHQDWLNGKEYKCKVSNKALPAPIEKTISKAKGQPREPQVYTLPPSREEMTKNQVSLTCLVKGFYPSDIAVEWESNGQPENNYKTTPPVLDSDGSFFLYSKLTVDKSRWQQGNVFSCSVMHEALHNHYTQKSLSLSPGK

SEQ ID NO: 1369 - protein, 214 aa, synthetic construct
  source 1..214: note = XENP27592 Chain 2 - 6E5A7[NKG2D]_H0L0_IgG1_PVA_/S267K
DIQLTQSPAILSVSPGERVSFSCRASQSIGTSIHWYQQRTNGSPRLLIKYASESISGIPSRFSGSGSGTDFTLSINGVESEDIADYYCQQSNTWPLTFGAGTKLEIKRTVAAPSVFIFPPSDEQLKSGTASVVCLLNNFYPREAKVQWKVDNALQSGNSQESVTEQDSKDSTYSLSSTLTLSKADYEKHKVYACEVTHQGLSSPVTKSFNRGEC

SEQ ID NO: 1370 - protein, 448 aa, synthetic construct
  source 1..448: note = XENP27593 Chain 1 - 6H7E7[NKG2D]_H0L0_IgG1_PVA_/S267K
QVQLQESGPGLVAPSQSLSITCTVSGFSLTSYGVHWIRQPPGKGLEWLGVIWAGGSTNYNSALMSRLSISKDNSKSQVFLKMNSLQIDDTAMYYCARGGYEGAAWFGYWGQGTTVTVSSASTKGPSVFPLAPSSKSTSGGTAALGCLVKDYFPEPVTVSWNSGALTSGVHTFPAVLQSSGLYSLSSVVTVPSSSLGTQTYICNVNHKPSNTKVDKKVEPKSCDKTHTCPPCPAPPVAGPSVFLFPPKPKDTLMISRTPEVTCVVVDVKHEDPEVKFNWYVDGVEVHNAKTKPREEQYNSTYRVVSVLTVLHQDWLNGKEYKCKVSNKALPAPIEKTISKAKGQPREPQVYTLPPSREEMTKNQVSLTCLVKGFYPSDIAVEWESNGQPENNYKTTPPVLDSDGSFFLYSKLTVDKSRWQQGNVFSCSVMHEALHNHYTQKSLSLSPGK

SEQ ID NO: 1371 - protein, 213 aa, synthetic construct
  source 1..213: note = XENP27593 Chain 2 - 6H7E7[NKG2D]_H0L0_IgG1_PVA_/S267K
DIQLTQSPAILSASPGEKVTMTCRASSSVSYMHWYQQKPGSSPKPWIYATSNLASGVPARFSGSGSGTSYSLTISRVEAEDAATYYCQQWNSNPLTFGAGTKLEIKRTVAAPSVFIFPPSDEQLKSGTASVVCLLNNFYPREAKVQWKVDNALQSGNSQESVTEQDSKDSTYSLSSTLTLSKADYEKHKVYACEVTHQGLSSPVTKSFNRGEC

SEQ ID NO: 1372 - protein, 450 aa, synthetic construct
  source 1..450: note = XENP27594 Chain 1 - 16F16[NKG2D]_H1L1_IgG1_PVA_/S267K
EVQLVESGGGLVKPGGSLRLSCAASGFTFSSYSMNWVRQAPGKGLEWVSSITSSSSYIYYADSVKGRFTISRDNAKNSLYLQMNSLRAEDTAVYYCARDRRYFDWFPLDYRGQGTLVTVSSASTKGPSVFPLAPSSKSTSGGTAALGCLVKDYFPEPVTVSWNSGALTSGVHTFPAVLQSSGLYSLSSVVTVPSSSLGTQTYICNVNHKPSNTKVDKKVEPKSCDKTHTCPPCPAPPVAGPSVFLFPPKPKDTLMISRTPEVTCVVVDVKHEDPEVKFNWYVDGVEVHNAKTKPREEQYNSTYRVVSVLTVLHQDWLNGKEYKCKVSNKALPAPIEKTISKAKGQPREPQVYTLPPSREEMTKNQVSLTCLVKGFYPSDIAVEWESNGQPENNYKTTPPVLDSDGSFFLYSKLTVDKSRWQQGNVFSCSVMHEALHNHYTQKSLSLSPGK

SEQ ID NO: 1373 - protein, 215 aa, synthetic construct
  source 1..215: note = XENP27594 Chain 2 - 16F16[NKG2D]_H1L1_IgG1_PVA_/S267K
DIQMTQSPSSLSASVGDRVTITCRASQGISSWLAWYQQKPEKAPKSLIYAASSLQSGVPSRFSGSGSGTDFTLTISSLQPEDFATYYCQQYNGYPYTFGQGTKLEIKRRTVAAPSVFIFPPSDEQLKSGTASVVCLLNNFYPREAKVQWKVDNALQSGNSQESVTEQDSKDSTYSLSSTLTLSKADYEKHKVYACEVTHQGLSSPVTKSFNRGEC

SEQ ID NO: 1374 - protein, 451 aa, synthetic construct
  source 1..451: note = XENP27595 Chain 1 - 16F31[NKG2D]_H1L1_IgG1_PVA_/S267K
EVQLVESGGGVVRPGGSLRLSCAASGFTFDDYGMTWVRQAPGKGLEWVSGINWNGGSTGYADSVKGRFTISRDNAKNSLYLQMNSLRAEDTALYYCARERELYYYYYGLDVWGQGTTVTVSSASTKGPSVFPLAPSSKSTSGGTAALGCLVKDYFPEPVTVSWNSGALTSGVHTFPAVLQSSGLYSLSSVVTVPSSSLGTQTYICNVNHKPSNTKVDKKVEPKSCDKTHTCPPCPAPPVAGPSVFLFPPKPKDTLMISRTPEVTCVVVDVKHEDPEVKFNWYVDGVEVHNAKTKPREEQYNSTYRVVSVLTVLHQDWLNGKEYKCKVSNKALPAPIEKTISKAKGQPREPQVYTLPPSREEMTKNQVSLTCLVKGFYPSDIAVEWESNGQPENNYKTTPPVLDSDGSFFLYSKLTVDKSRWQQGNVFSCSVMHEALHNHYTQKSLSLSPGK

SEQ ID NO: 1375 - protein, 216 aa, synthetic construct
  source 1..216: note = XENP27595 Chain 2 - 16F31[NKG2D]_H1L1_IgG1_PVA_/S267K
EIVLTQSPGTLSLSPGERATLSCRASQSVSSSYLAWYQQKPGQAPRLLIYGASSRATGIPDRFSGSGSGTDFTLTISRLEPEDFAVYYCQQYGSSPFTFGPGTKVDIKRRTVAAPSVFIFPPSDEQLKSGTASVVCLLNNFYPREAKVQWKVDNALQSGNSQESVTEQDSKDSTYSLSSTLTLSKADYEKHKVYACEVTHQGLSSPVTKSFNRGEC

SEQ ID NO: 1376 - protein, 451 aa, synthetic construct
  source 1..451: note = XENP27596 Chain 1 - humON72[NKG2D]_H1L1_IgG1_PVA_/S267K
QVQLVQSGAEVKKPGASVKVSCKASGYTFTNYWMHWVRQAPGQGLEWMGEIDPSDIYTNYAQKFQGRVTMTRDTSTSTVYMELSSLRSEDTAVYYCARGIYDGYYVYGMDYWGQGTTVTVSSASTKGPSVFPLAPSSKSTSGGTAALGCLVKDYFPEPVTVSWNSGALTSGVHTFPAVLQSSGLYSLSSVVTVPSSSLGTQTYICNVNHKPSNTKVDKKVEPKSCDKTHTCPPCPAPPVAGPSVFLFPPKPKDTLMISRTPEVTCVVVDVKHEDPEVKFNWYVDGVEVHNAKTKPREEQYNSTYRVVSVLTVLHQDWLNGKEYKCKVSNKALPAPIEKTISKAKGQPREPQVYTLPPSREEMTKNQVSLTCLVKGFYPSDIAVEWESNGQPENNYKTTPPVLDSDGSFFLYSKLTVDKSRWQQGNVFSCSVMHEALHNHYTQKSLSLSPGK

SEQ ID NO: 1377 - protein, 214 aa, synthetic construct; identical to SEQ ID NO: 13
  source 1..214: note = XENP27596 Chain 2 - humON72[NKG2D]_H1L1_IgG1_PVA_/S267K

SEQ ID NO: 1378 - protein, 447 aa, synthetic construct
  source 1..447: note = XENP27597 Chain 1 - KYK-1.0[NKG2D]_H1L1_IgG1_PVA_/S267K
EVQLVESGGGVVQPGGSLRLSCAASGFTFSSYGMHWVRQAPGKGLEWVAFIRYDGSNKYYADSVKGRFTISRDNSKNTKYLQMNSLRAEDTAVYYCAKDRFGYYLDYWGQGTLVTVSSASTKGPSVFPLAPSSKSTSGGTAALGCLVKDYFPEPVTVSWNSGALTSGVHTFPAVLQSSGLYSLSSVVTVPSSSLGTQTYICNVNHKPSNTKVDKKVEPKSCDKTHTCPPCPAPPVAGPSVFLFPPKPKDTLMISRTPEVTCVVVDVKHEDPEVKFNWYVDGVEVHNAKTKPREEQYNSTYRVVSVLTVLHQDWLNGKEYKCKVSNKALPAPIEKTISKAKGQPREPQVYTLPPSREEMTKNQVSLTCLVKGFYPSDIAVEWESNGQPENNYKTTPPVLDSDGSFFLYSKLTVDKSRWQQGNVFSCSVMHEALHNHYTQKSLSLSPGK

SEQ ID NO: 1379 - protein, 214 aa, synthetic construct
  source 1..214: note = XENP27597 Chain 2 - KYK-1.0[NKG2D]_H1L1_IgG1_PVA_/S267K
QPVLTQPSSVSVAPGETARIPCGGDDIETKSVHWYQQKPGQAPVLVIYDDDDRPSGIPERFFGSNSGNTATLSISRVEAGDEADYYCQVWDDNNDEWVFGGGTQLTVLGQPKAAPSVTLFPPSSEELQANKATLVCLISDFYPGAVTVAWKADSSPVKAGVETTTPSKQSNNKYAASSYLSLTPEQWKSHRSYSCQVTHEGSTVEKTVAPTECS

SEQ ID NO: 1380 - protein, 446 aa, synthetic construct
  source 1..446: note = XENP27598 Chain 1 - 11B2D10[NKG2D]_H1L1_IgG1_PVA_/S267K
QVQLVQSGAEVKKPGASVKVSCKASGYTFTSYWMNWVRQAPGQGLEWMGRIDPYDSETHYNQKFQGRVTMTVDKSTSTAYMELSSLRSEDTAVYYCAKMGDYSFDYWGQGTLVTVSSASTKGPSVFPLAPSSKSTSGGTAALGCLVKDYFPEPVTVSWNSGALTSGVHTFPAVLQSSGLYSLSSVVTVPSSSLGTQTYICNVNHKPSNTKVDKKVEPKSCDKTHTCPPCPAPPVAGPSVFLFPPKPKDTLMISRTPEVTCVVVDVKHEDPEVKFNWYVDGVEVHNAKTKPREEQYNSTYRVVSVLTVLHQDWLNGKEYKCKVSNKALPAPIEKTISKAKGQPREPQVYTLPPSREEMTKNQVSLTCLVKGFYPSDIAVEWESNGQPENNYKTTPPVLDSDGSFFLYSKLTVDKSRWQQGNVFSCSVMHEALHNHYTQKSLSLSPGK

SEQ ID NO: 1381 - protein, 214 aa, synthetic construct
  source 1..214: note = XENP27598 Chain 2 - 11B2D10[NKG2D]_H1L1_IgG1_PVA_/S267K
DIQLTQSPSSLSASVGDRVTITCRASGNIHNYLAWYQQKPGKSPKVLVYNAKTLADGVPSRFSGSGSGTDYTLTISSLQPEDFATYYCQHFWSTTWTFGGGTKVEIKRTVAAPSVFIFPPSDEQLKSGTASVVCLLNNFYPREAKVQWKVDNALQSGNSQESVTEQDSKDSTYSLSSTLTLSKADYEKHKVYACEVTHQGLSSPVTKSFNRGEC

SEQ ID NO: 1382 - protein, 446 aa, synthetic construct; identical to SEQ ID NO: 1380
  source 1..446: note = XENP27599 Chain 1 - 11B2D10[NKG2D]_H1_L1.1_IgG1_PVA_/S267K

SEQ ID NO: 1383 - protein, 214 aa, synthetic construct
  source 1..214: note = XENP27599 Chain 2 - 11B2D10[NKG2D]_H1_L1.1_IgG1_PVA_/S267K
DIQLTQSPSSLSASVGDRVTITCRASGNIHNYLAWYQQKPGKSPKVLVYNAKTLADGVPSRFSGSGSGTDYTLTISSLQPEDFATYYCQHFWSTPWTFGGGTKVEIKRTVAAPSVFIFPPSDEQLKSGTASVVCLLNNFYPREAKVQWKVDNALQSGNSQESVTEQDSKDSTYSLSSTLTLSKADYEKHKVYACEVTHQGLSSPVTKSFNRGEC

SEQ ID NO: 1384 - protein, 446 aa, synthetic construct; identical to SEQ ID NO: 1380
  source 1..446: note = XENP27600 Chain 1 - 11B2D10[NKG2D]_H1L2_IgG1_PVA_/S267K

SEQ ID NO: 1385 - protein, 214 aa, synthetic construct
  source 1..214: note = XENP27600 Chain 2 - 11B2D10[NKG2D]_H1L2_IgG1_PVA_/S267K
DIQLTQSPDSLAVSLGERATINCKASGNIHNYLAWYQQKPGQSPKVLVYNAKTLADGVPSRFSGSGSGTDYTLTISSLQAEDVAVYYCQHFWSTTWTFGGGTKVEIKRTVAAPSVFIFPPSDEQLKSGTASVVCLLNNFYPREAKVQWKVDNALQSGNSQESVTEQDSKDSTYSLSSTLTLSKADYEKHKVYACEVTHQGLSSPVTKSFNRGEC

SEQ ID NO: 1386 - protein, 446 aa, synthetic construct
  source 1..446: note = XENP27601 Chain 1 - 11B2D10[NKG2D]_H2L1_IgG1_PVA_/S267K
EVQLVQSGAEVKKPGESLRISCKASGYTFTSYWMNWVRQMPGKGLEWMGRIDPYDSETHYNPSFQGHVTISVDKSISTAYLQWSSLKASDTAMYYCAKMGDYSFDYWGQGTLVTVSSASTKGPSVFPLAPSSKSTSGGTAALGCLVKDYFPEPVTVSWNSGALTSGVHTFPAVLQSSGLYSLSSVVTVPSSSLGTQTYICNVNHKPSNTKVDKKVEPKSCDKTHTCPPCPAPPVAGPSVFLFPPKPKDTLMISRTPEVTCVVVDVKHEDPEVKFNWYVDGVEVHNAKTKPREEQYNSTYRVVSVLTVLHQDWLNGKEYKCKVSNKALPAPIEKTISKAKGQPREPQVYTLPPSREEMTKNQVSLTCLVKGFYPSDIAVEWESNGQPENNYKTTPPVLDSDGSFFLYSKLTVDKSRWQQGNVFSCSVMHEALHNHYTQKSLSLSPGK

SEQ ID NO: 1387 - protein, 214 aa, synthetic construct; identical to SEQ ID NO: 1381
  source 1..214: note = XENP27601 Chain 2 - 11B2D10[NKG2D]_H2L1_IgG1_PVA_/S267K

SEQ ID NO: 1388 - protein, 446 aa, synthetic construct; identical to SEQ ID NO: 1386
  source 1..446: note = XENP27602 Chain 1 - 11B2D10[NKG2D]_H2_L1.1_IgG1_PVA_/S267K

SEQ ID NO: 1389 - protein, 214 aa, synthetic construct; identical to SEQ ID NO: 1383
  source 1..214: note = XENP27602 Chain 2 - 11B2D10[NKG2D]_H2_L1.1_IgG1_PVA_/S267K

SEQ ID NO: 1390 - protein, 446 aa, synthetic construct; identical to SEQ ID NO: 1386
  source 1..446: note = XENP27603 Chain 1 - 11B2D10[NKG2D]_H2L2_IgG1_PVA_/S267K

SEQ ID NO: 1391 - protein, 214 aa, synthetic construct; identical to SEQ ID NO: 1385
  source 1..214: note = XENP27603 Chain 2 - 11B2D10[NKG2D]_H2L2_IgG1_PVA_/S267K

SEQ ID NO: 1392 - protein, 446 aa, synthetic construct
  source 1..446: note = XENP27604 Chain 1 - 11B2D10[NKG2D]_H3L1_IgG1_PVA_/S267K
EVQLVESGGGLVQPGGSLRLSCAASGYTFTSYWMNWVRQAPGKGLVWVSRIDPYDSETHYNQKVKGRFTISVDKAKSTAYLQMNSLRAEDTAVYYCAKMGDYSFDYWGQGTLVTVSSASTKGPSVFPLAPSSKSTSGGTAALGCLVKDYFPEPVTVSWNSGALTSGVHTFPAVLQSSGLYSLSSVVTVPSSSLGTQTYICNVNHKPSNTKVDKKVEPKSCDKTHTCPPCPAPPVAGPSVFLFPPKPKDTLMISRTPEVTCVVVDVKHEDPEVKFNWYVDGVEVHNAKTKPREEQYNSTYRVVSVLTVLHQDWLNGKEYKCKVSNKALPAPIEKTISKAKGQPREPQVYTLPPSREEMTKNQVSLTCLVKGFYPSDIAVEWESNGQPENNYKTTPPVLDSDGSFFLYSKLTVDKSRWQQGNVFSCSVMHEALHNHYTQKSLSLSPGK

SEQ ID NO: 1393 - protein, 214 aa, synthetic construct; identical to SEQ ID NO: 1381
  source 1..214: note = XENP27604 Chain 2 - 11B2D10[NKG2D]_H3L1_IgG1_PVA_/S267K

SEQ ID NO: 1394 - protein, 446 aa, synthetic construct; identical to SEQ ID NO: 1392
  source 1..446: note = XENP27605 Chain 1 - 11B2D10[NKG2D]_H3_L1.1_IgG1_PVA_/S267K

SEQ ID NO: 1395 - protein, 214 aa, synthetic construct; identical to SEQ ID NO: 1383
  source 1..214: note = XENP27605 Chain 2 - 11B2D10[NKG2D]_H3_L1.1_IgG1_PVA_/S267K

SEQ ID NO: 1396 - protein, 446 aa, synthetic construct; identical to SEQ ID NO: 1392
  source 1..446: note = XENP27606 Chain 1 - 11B2D10[NKG2D]_H3L2_IgG1_PVA_/S267K

SEQ ID NO: 1397 - protein, 214 aa, synthetic construct; identical to SEQ ID NO: 1385
  source 1..214: note = XENP27606 Chain 2 - 11B2D10[NKG2D]_H3L2_IgG1_PVA_/S267K

SEQ ID NO: 1398 - protein, 449 aa, synthetic construct
  source 1..449: note = XENP27607 Chain 1 - 6E5A7[NKG2D]_H1L1_IgG1_PVA_/S267K
EVQLVESGGGLVQPGGSLRLSCAVSGFSLTIYGVHWVRQAPGKGLEWVSVIWSGGSTDYNAKVKGRFTISKDNSKRTVYLQMNSLRAEDTAVYYCSRKSHDGYYGVMDYWGQGTTVTVSSASTKGPSVFPLAPSSKSTSGGTAALGCLVKDYFPEPVTVSWNSGALTSGVHTFPAVLQSSGLYSLSSVVTVPSSSLGTQTYICNVNHKPSNTKVDKKVEPKSCDKTHTCPPCPAPPVAGPSVFLFPPKPKDTLMISRTPEVTCVVVDVKHEDPEVKFNWYVDGVEVHNAKTKPREEQYNSTYRVVSVLTVLHQDWLNGKEYKCKVSNKALPAPIEKTISKAKGQPREPQVYTLPPSREEMTKNQVSLTCLVKGFYPSDIAVEWESNGQPENNYKTTPPVLDSDGSFFLYSKLTVDKSRWQQGNVFSCSVMHEALHNHYTQKSLSLSPGK

SEQ ID NO: 1399 - protein, 214 aa, synthetic construct; identical to SEQ ID NO: 15
  source 1..214: note = XENP27607 Chain 2 - 6E5A7[NKG2D]_H1L1_IgG1_PVA_/S267K

SEQ ID NO: 1400 - protein, 449 aa, synthetic construct; identical to SEQ ID NO: 1398
  source 1..449: note = XENP27608 Chain 1 - 6E5A7[NKG2D]_H1L2_IgG1_PVA_/S267K

SEQ ID NO: 1401 - protein, 214 aa, synthetic construct
  source 1..214: note = XENP27608 Chain 2 - 6E5A7[NKG2D]_H1L2_IgG1_PVA_/S267K
DIQLTQSPSSLSASVGDRVTITCRASQSIGTSIHWYQQKPGKSPKLLIKYASESISGIPSRFSGSGSGTDFTLTISSLQPEDFATYYCQQSNTWPLTFGAGTKVEIKRTVAAPSVFIFPPSDEQLKSGTASVVCLLNNFYPREAKVQWKVDNALQSGNSQESVTEQDSKDSTYSLSSTLTLSKADYEKHKVYACEVTHQGLSSPVTKSFNRGEC

SEQ ID NO: 1402 - protein, 449 aa, synthetic construct
  source 1..449: note = XENP27609 Chain 1 - 6E5A7[NKG2D]_H2L1_IgG1_PVA_/S267K
QVQLVQSGAEVKKPGASVKVSCKVSGFSLTIYGVHWVRQAPGQGLEWMGVIWSGGSTDYNAKFQGRVTMTKDNSKRTVYMELSSLRSEDTAVYYCSRKSHDGYYGVMDYWGQGTTVTVSSASTKGPSVFPLAPSSKSTSGGTAALGCLVKDYFPEPVTVSWNSGALTSGVHTFPAVLQSSGLYSLSSVVTVPSSSLGTQTYICNVNHKPSNTKVDKKVEPKSCDKTHTCPPCPAPPVAGPSVFLFPPKPKDTLMISRTPEVTCVVVDVKHEDPEVKFNWYVDGVEVHNAKTKPREEQYNSTYRVVSVLTVLHQDWLNGKEYKCKVSNKALPAPIEKTISKAKGQPREPQVYTLPPSREEMTKNQVSLTCLVKGFYPSDIAVEWESNGQPENNYKTTPPVLDSDGSFFLYSKLTVDKSRWQQGNVFSCSVMHEALHNHYTQKSLSLSPGK

SEQ ID NO: 1403 - protein, 214 aa, synthetic construct; identical to SEQ ID NO: 15
  source 1..214: note = XENP27609 Chain 2 - 6E5A7[NKG2D]_H2L1_IgG1_PVA_/S267K

SEQ ID NO: 1404 - protein, 449 aa, synthetic construct; identical to SEQ ID NO: 1402
  source 1..449: note = XENP27610 Chain 1 - 6E5A7[NKG2D]_H2L2_IgG1_PVA_/S267K

SEQ ID NO: 1405 - protein, 214 aa, synthetic construct; identical to SEQ ID NO: 1401
  source 1..214: note = XENP27610 Chain 2 - 6E5A7[NKG2D]_H2L2_IgG1_PVA_/S267K

SEQ ID NO: 1406 - protein, 448 aa, synthetic construct
  source 1..448: note = XENP27611 Chain 1 - 6H7E7[NKG2D]_H1L1_IgG1_PVA_/S267K
QVQLVQSGAEVKKPGASVKVSCKVSGFSLTSYGVHWIRQAPGQGLEWMGVIWAGGSTNYNSKFQGRVTMTKDNSKSTVYMELSSLRSEDTAVYYCARGGYEGAAWFGYWGQGTLVTVSSASTKGPSVFPLAPSSKSTSGGTAALGCLVKDYFPEPVTVSWNSGALTSGVHTFPAVLQSSGLYSLSSVVTVPSSSLGTQTYICNVNHKPSNTKVDKKVEPKSCDKTHTCPPCPAPPVAGPSVFLFPPKPKDTLMISRTPEVTCVVVDVKHEDPEVKFNWYVDGVEVHNAKTKPREEQYNSTYRVVSVLTVLHQDWLNGKEYKCKVSNKALPAPIEKTISKAKGQPREPQVYTLPPSREEMTKNQVSLTCLVKGFYPSDIAVEWESNGQPENNYKTTPPVLDSDGSFFLYSKLTVDKSRWQQGNVFSCSVMHEALHNHYTQKSLSLSPGK

SEQ ID NO: 1407 - protein, 213 aa, synthetic construct
  source 1..213: note = XENP27611 Chain 2 - 6H7E7[NKG2D]_H1L1_IgG1_PVA_/S267K
DIQLTQSPSSLSASVGDRVTITCRASSSVSYMHWYQQKPGKSPKPLIYATSNLASGVPARFSGSGSGTDYTLTISSLQPEDFATYYCQQWNSNPLTFGAGTKVEIKRTVAAPSVFIFPPSDEQLKSGTASVVCLLNNFYPREAKVQWKVDNALQSGNSQESVTEQDSKDSTYSLSSTLTLSKADYEKHKVYACEVTHQGLSSPVTKSFNRGEC

SEQ ID NO: 1408 - protein, 448 aa, synthetic construct; identical to SEQ ID NO: 1406
  source 1..448: note = XENP27612 Chain 1 - 6H7E7[NKG2D]_H1L2_IgG1_PVA_/S267K

SEQ ID NO: 1409 - protein, 213 aa, synthetic construct
  source 1..213: note = XENP27612 Chain 2 - 6H7E7[NKG2D]_H1L2_IgG1_PVA_/S267K
DIQLTQSPATLSLSPGERATLSCRASSSVSYMHWYQQKPGQSPRPLIYATSNLASGVPARFSGSGSGTDYTLTISSLEPEDFAVYYCQQWNSNPLTFGAGTKVEIKRTVAAPSVFIFPPSDEQLKSGTASVVCLLNNFYPREAKVQWKVDNALQSGNSQESVTEQDSKDSTYSLSSTLTLSKADYEKHKVYACEVTHQGLSSPVTKSFNRGEC

SEQ ID NO: 1410 - protein, 448 aa, synthetic construct
  source 1..448: note = XENP27613 Chain 1 - 6H7E7[NKG2D]_H2L1_IgG1_PVA_/S267K
QVQLQESGPGLVKPSETLSLTCTVSGFSLTSYGVHWIRQPPGKGLEWIGVIWAGGSTNYNPSLKSRVTISKDNSKSQVSLKLSSVTAADTAVYYCARGGYEGAAWFGYWGQGTLVTVSSASTKGPSVFPLAPSSKSTSGGTAALGCLVKDYFPEPVTVSWNSGALTSGVHTFPAVLQSSGLYSLSSVVTVPSSSLGTQTYICNVNHKPSNTKVDKKVEPKSCDKTHTCPPCPAPPVAGPSVFLFPPKPKDTLMISRTPEVTCVVVDVKHEDPEVKFNWYVDGVEVHNAKTKPREEQYNSTYRVVSVLTVLHQDWLNGKEYKCKVSNKALPAPIEKTISKAKGQPREPQVYTLPPSREEMTKNQVSLTCLVKGFYPSDIAVEWESNGQPENNYKTTPPVLDSDGSFFLYSKLTVDKSRWQQGNVFSCSVMHEALHNHYTQKSLSLSPGK

SEQ ID NO: 1411 - protein, 213 aa, synthetic construct; identical to SEQ ID NO: 1407
  source 1..213: note = XENP27613 Chain 2 - 6H7E7[NKG2D]_H2L1_IgG1_PVA_/S267K

SEQ ID NO: 1412 - protein, 448 aa, synthetic construct; identical to SEQ ID NO: 1410
  source 1..448: note = XENP27614 Chain 1 - 6H7E7[NKG2D]_H2L2_IgG1_PVA_/S267K

SEQ ID NO: 1413 - protein, 213 aa, synthetic construct; identical to SEQ ID NO: 1409
  source 1..213: note = XENP27614 Chain 2 - 6H7E7[NKG2D]_H2L2_IgG1_PVA_/S267K

SEQ ID NO: 1414 - protein, 444 aa, synthetic construct; identical to SEQ ID NO: 1317
  source 1..444: note = XENP30526 Chain 1 - MS[NKG2D]_H0L0_Fab-huIL10.104_huIL10.104_(G4S)2-IgG1_pI(-)_ Isosteric_A_PVA_/S267K/L368D/K370S-IgG1_C220S/PVA_/S267K/S3 64K/E357Q

SEQ ID NO: 1415 - protein, 560 aa, synthetic construct
  source 1..560: note = XENP30526 Chain 2 - MS[NKG2D]_H0L0_Fab-huIL10.104_huIL10.104_(G4S)2-IgG1_pI(-)_ Isosteric_A_PVA_/S267K/L368D/K370S-IgG1_C220S/PVA_/S267K/S3 64K/E357Q
SPGQGTQSENSCTHFPGNLPNMLRDLRDAFSRVKTFFQMKNQLDDLLLKESLLEDFKGYLGCQALSEMIQFYLEEVMPQAENQDPDIKAHVNSLGENLKTLRLRLRRCHRFLPCENKSKAVEQVKNAFNKLQEKGIYKAMSEFDIFINYIEAYMTMKIRNSPGQGTQSENSCTHFPGNLPNMLRDLRDAFSRVKTFFQMKDQLDDLLLKESLLEDFKGYLGCQALSEMIQFYLEEVMPQAENQDPDIKAHVNSLGENLKTLRLRLRRCHRFLPCENKSKAVEQVKNAFNKLQEKGIYKAMSEFDIFINYIEAYMTMKIRGGGGSGGGGSEPKSSDKTHTCPPCPAPPVAGPSVFLFPPKPKDTLMISRTPEVTCVVVDVKHEDPEVKFNWYVDGVEVHNAKTKPREEQYNSTYRVVSVLTVLHQDWLNGKEYKCKVSNKALPAPIEKTISKAKGQPREPQVYTLPPSREQMTKNQVKLTCLVKGFYPSDIAVEWESNGQPENNYKTTPPVLDSDGSFFLYSKLTVDKSRWQQGNVFSCSVMHEALHNHYTQKSLSLSPGK

SEQ ID NO: 1416 - protein, 215 aa, synthetic construct; identical to SEQ ID NO: 1319
  source 1..215: note = XENP30526 Chain 3 - MS[NKG2D]_H0L0_Fab-huIL10.104_huIL10.104_(G4S)2-IgG1_pI(-)_ Isosteric_A_PVA_/S267K/L368D/K370S-IgG1_C220S/PVA_/S267K/S3 64K/E357Q

SEQ ID NO: 1417 - protein, 444 aa, synthetic construct; identical to SEQ ID NO: 1317
  source 1..444: note = XENP30527 Chain 1 - MS[NKG2D]_H0L0_Fab-huIL10.105_huIL10.105_(G4S)2-IgG1_pI(-)_ Isosteric_A_PVA_/S267K/L368D/K370S-IgG1_C220S/PVA_/S267K/S3 64K/E357Q

SEQ ID NO: 1418 - protein, 560 aa, synthetic construct
  source 1..560: note = XENP30527 Chain 2 - MS[NKG2D]_H0L0_Fab-huIL10.105_huIL10.105_(G4S)2-IgG1_pI(-)_ Isosteric_A_PVA_/S267K/L368D/K370S-IgG1_C220S/PVA_/S267K/S3 64K/E357Q
SPGQGTQSENSCTHFPGNLPNMLRDLRDAFSRVKTFFQMKDQLDDLLLKESLLEDFKGYLGCQALSEMIQFYLEEVMPQAENQDPDIKAHVNSLGENLKTLRLRLRRCHRFLPCENKSKAVEQVKNAFNKLQEKGIYKAMSEFNIFINYIEAYMTMKIRNSPGQGTQSENSCTHFPGNLPNMLRDLRDAFSRVKTFFQMKDQLDDLLLKESLLEDFKGYLGCQALSEMIQFYLEEVMPQAENQDPDIKAHVNSLGENLKTLRLRLRRCHRFLPCENKSKAVEQVKNAFNKLQEKGIYKAMSEFDIFINYIEAYMTMKIRGGGGSGGGGSEPKSSDKTHTCPPCPAPPVAGPSVFLFPPKPKDTLMISRTPEVTCVVVDVKHEDPEVKFNWYVDGVEVHNAKTKPREEQYNSTYRVVSVLTVLHQDWLNGKEYKCKVSNKALPAPIEKTISKAKGQPREPQVYTLPPSREQMTKNQVKLTCLVKGFYPSDIAVEWESNGQPENNYKTTPPVLDSDGSFFLYSKLTVDKSRWQQGNVFSCSVMHEALHNHYTQKSLSLSPGK

SEQ ID NO: 1419 - protein, 215 aa, synthetic construct; identical to SEQ ID NO: 1319
  source 1..215: note = XENP30527 Chain 3 - MS[NKG2D]_H0L0_Fab-huIL10.105_huIL10.105_(G4S)2-IgG1_pI(-)_ Isosteric_A_PVA_/S267K/L368D/K370S-IgG1_C220S/PVA_/S267K/S3 64K/E357Q

SEQ ID NO: 1420 - protein, 444 aa, synthetic construct; identical to SEQ ID NO: 1317
  source 1..444: note = XENP30528 Chain 1 - MS[NKG2D]_H0L0_Fab-huIL10.107_huIL10.107_(G4S)2-IgG1_pI(-)_ Isosteric_A_PVA_/S267K/L368D/K370S-IgG1_C220S/PVA_/S267K/S3 64K/E357Q

SEQ ID NO: 1421 - protein, 560 aa, synthetic construct
  source 1..560: note = XENP30528 Chain 2 - MS[NKG2D]_H0L0_Fab-huIL10.107_huIL10.107_(G4S)2-IgG1_pI(-)_ Isosteric_A_PVA_/S267K/L368D/K370S-IgG1_C220S/PVA_/S267K/S3 64K/E357Q
SPGQGTQSENSCTHFPGNLPNMLRDLRDAFSRVKTFFQMKDQLDDLLLKESLLEDFKGYLGCQALSEMIQFYLEEVMPQAENQDPDIKAHVNSLGENLKTLRLRLRRCHRFLPCENKSKAVEQVKNAFNKLQEKGIYKAMSEFDIFINYIEAYMTMKIRNSPGQGTQSENSCTHFPGNLPDMLRDLRDAFSRVKTFFQMKDQLDDLLLKESLLEDFKGYLGCQALSEMIQFYLEEVMPQAENQDPDIKAHVNSLGENLKTLRLRLRRCHRFLPCENKSKAVEQVKNAFNKLQEKGIYKAMSEFDIFINYIEAYMTMKIRGGGGSGGGGSEPKSSDKTHTCPPCPAPPVAGPSVFLFPPKPKDTLMISRTPEVTCVVVDVKHEDPEVKFNWYVDGVEVHNAKTKPREEQYNSTYRVVSVLTVLHQDWLNGKEYKCKVSNKALPAPIEKTISKAKGQPREPQVYTLPPSREQMTKNQVKLTCLVKGFYPSDIAVEWESNGQPENNYKTTPPVLDSDGSFFLYSKLTVDKSRWQQGNVFSCSVMHEALHNHYTQKSLSLSPGK

SEQ ID NO: 1422 - protein, 215 aa, synthetic construct; identical to SEQ ID NO: 1319
  source 1..215: note = XENP30528 Chain 3 - MS[NKG2D]_H0L0_Fab-huIL10.107_huIL10.107_(G4S)2-IgG1_pI(-)_ Isosteric_A_PVA_/S267K/L368D/K370S-IgG1_C220S/PVA_/S267K/S3 64K/E357Q

SEQ ID NO: 1423 - protein, 444 aa, synthetic construct; identical to SEQ ID NO: 1317
  source 1..444: note = XENP31819 Chain 1 - MS[NKG2D]_H0L0_Fab-huIL10.102_huIL10.102_(G4S)2-IgG1_pI(-)_ Isosteric_A_PVA_/S267K/L368D/K370S-IgG1_C220S/PVA_/S267K/S3 64K/E357Q

SEQ ID NO: 1424 - protein, 560 aa, synthetic construct
  source 1..560: note = XENP31819 Chain 2 - MS[NKG2D]_H0L0_Fab-huIL10.102_huIL10.102_(G4S)2-IgG1_pI(-)_ Isosteric_A_PVA_/S267K/L368D/K370S-IgG1_C220S/PVA_/S267K/S3 64K/E357Q
SPGQGTQSENSCTHFPGNLPNMLRDLRDAFSRVKTFFQMKDQLDDLLLKESLLEDFKGYLGCQALSEMIQFYLEEVMPQAENQDPDIKAHVNSLGENLKTLRLRLRRCHRFLPCENKSKAVEQVKNAFNKLQEKGIYKAMSEFDIFINYIEAYMTMKIRNSPGQGTQSENSCTHFPGNLPNMLRDLRDAFSRVKTFFQMKDQLDDLLLKESLLEDFKGYLGCQALSEMIQFYLEEVMPQAENQDPDIKAHVNSLGENLKTLRLRLRRCHRFLPCENKSKAVEQVKNAFNKLQEKGIYKAMSEFDIFINYIEAYMTMKIRGGGGSGGGGSEPKSSDKTHTCPPCPAPPVAGPSVFLFPPKPKDTLMISRTPEVTCVVVDVKHEDPEVKFNWYVDGVEVHNAKTKPREEQYNSTYRVVSVLTVLHQDWLNGKEYKCKVSNKALPAPIEKTISKAKGQPREPQVYTLPPSREQMTKNQVKLTCLVKGFYPSDIAVEWESNGQPENNYKTTPPVLDSDGSFFLYSKLTVDKSRWQQGNVFSCSVMHEALHNHYTQKSLSLSPGK

SEQ ID NO: 1425 - protein, 215 aa, synthetic construct; identical to SEQ ID NO: 1319
  source 1..215: note = XENP31819 Chain 3 - MS[NKG2D]_H0L0_Fab-huIL10.102_huIL10.102_(G4S)2-IgG1_pI(-)_ Isosteric_A_PVA_/S267K/L368D/K370S-IgG1_C220S/PVA_/S267K/S3 64K/E357Q

SEQ ID NO: 1426 - protein, 448 aa, synthetic construct
  source 1..448: note = XENP33019 Chain 1 - 2E6A3.134A[B7H3]_H1L1_Fab-2E6A3.134A[B7H3]_H1L1_Fab_(G4S)2_ 6H7E7[NKG2D]_H1L1_scFv(GKPGS)4_(G4S)2-IgG1_pI(-)_Isosteric_ A_/PVA_/S267K/L368D/K370S-Fc(222)_IgG1_PVA_/S267K/S364K/E35 7Q
EVQLLESGGGLVQPGGSLRLSCAASGFTFSSYAMSWVRQAPGKGLEWVSVISGSGASTYYADSVKGRFTISRDNSKNTLYLQMNSLRAEDTAVYYCAKGYYFSRGFDYWGQGTLVTVSSASTKGPSVFPLAPSSKSTSGGTAALGCLVKDYFPEPVTVSWNSGALTSGVHTFPAVLQSSGLYSLSSVVTVPSSSLGTQTYICNVNHKPSDTKVDKKVEPKSCDKTHTCPPCPAPPVAGPSVFLFPPKPKDTLMISRTPEVTCVVVDVKHEDPEVKFNWYVDGVEVHNAKTKPREEEYNSTYRVVSVLTVLHQDWLNGKEYKCKVSNKALPAPIEKTISKAKGQPREPQVYTLPPSREEMTKNQVSLTCDVSGFYPSDIAVEWESDGQPENNYKTTPPVLDSDGSFFLYSKLTVDKSRWEQGDVFSCSVMHEALHNHYTQKSLSLSPGK

SEQ ID NO: 1427 - protein, 712 aa, synthetic construct
  source 1..712: note = XENP33019 Chain 2 - 2E6A3.134A[B7H3]_H1L1_Fab-2E6A3.134A[B7H3]_H1L1_Fab_(G4S)2_ 6H7E7[NKG2D]_H1L1_scFv(GKPGS)4_(G4S)2-IgG1_pI(-)_Isosteric_ A_/PVA_/S267K/L368D/K370S-Fc(222)_IgG1_PVA_/S267K/S364K/E35 7Q
EVQLLESGGGLVQPGGSLRLSCAASGFTFSSYAMSWVRQAPGKGLEWVSVISGSGASTYYADSVKGRFTISRDNSKNTLYLQMNSLRAEDTAVYYCAKGYYFSRGFDYWGQGTLVTVSSASTKGPSVFPLAPSSKSTSGGTAALGCLVKDYFPEPVTVSWNSGALTSGVHTFPAVLQSSGLYSLSSVVTVPSSSLGTQTYICNVNHKPSNTKVDKKVEPKSCGGGGSGGGGSQVQLVQSGAEVKKPGASVKVSCKVSGFSLTSYGVHWIRQAPGQGLEWMGVIWAGGSTNYNSKFQGRVTMTKDNSKSTVYMELSSLRSEDTAVYYCARGGYEGAAWFGYWGQGTLVTVSSGKPGSGKPGSGKPGSGKPGSDIQLTQSPSSLSASVGDRVTITCRASSSVSYMHWYQQKPGKSPKPLIYATSNLASGVPARFSGSGSGTDYTLTISSLQPEDFATYYCQQWNSNPLTFGAGTKVEIKGGGGSGGGGSKTHTCPPCPAPPVAGPSVFLFPPKPKDTLMISRTPEVTCVVVDVKHEDPEVKFNWYVDGVEVHNAKTKPREEQYNSTYRVVSVLTVLHQDWLNGKEYKCKVSNKALPAPIEKTISKAKGQPREPQVYTLPPSREQMTKNQVKLTCLVKGFYPSDIAVEWESNGQPENNYKTTPPVLDSDGSFFLYSKLTVDKSRWQQGNVFSCSVMHEALHNHYTQKSLSLSPGK

SEQ ID NO: 1428 - protein, 214 aa, synthetic construct
  source 1..214: note = XENP33019 Chain 3 - 2E6A3.134A[B7H3]_H1L1_Fab-2E6A3.134A[B7H3]_H1L1_Fab_(G4S)2_ 6H7E7[NKG2D]_H1L1_scFv(GKPGS)4_(G4S)2-IgG1_pI(-)_Isosteric_ A_/PVA_/S267K/L368D/K370S-Fc(222)_IgG1_PVA_/S267K/S364K/E35 7Q
DIQMTQSPSSLSASVGDRVTITCRASQSISSYLNWYQQKPGKAPKLLIYAASSLQSGVPSRFSGSGSGTDFTLTISSLQPEDFATYYCQQSYSVPHTFGQGTKLEIKRTVAAPSVFIFPPSDEQLKSGTASVVCLLNNFYPREAKVQWKVDNALQSGNSQESVTEQDSKDSTYSLSSTLTLSKADYEKHKVYACEVTHQGLSSPVTKSFNRGEC

SEQ ID NO: 1429 - protein, 448 aa, synthetic construct; identical to SEQ ID NO: 1426
  source 1..448: note = XENP33020 Chain 1 - 2E6A3.134A[B7H3]_H1L1_Fab-2E6A3.134A[B7H3]_H1L1_Fab_(G4S)2_ 6H7E7[NKG2D]_L1H1_scFv(GKPGS)4_(G4S)2-IgG1_pI(-)_Isosteric_ A_/PVA_/S267K/L368D/K370S-Fc(222)_IgG1_PVA_/S267K/S364K/E35 7Q

SEQ ID NO: 1430 - protein, 712 aa, synthetic construct
  source 1..712: note = XENP33020 Chain 2 - 2E6A3.134A[B7H3]_H1L1_Fab-2E6A3.134A[B7H3]_H1L1_Fab_(G4S)2_ 6H7E7[NKG2D]_L1H1_scFv(GKPGS)4_(G4S)2-IgG1_pI(-)_Isosteric_ A_/PVA_/S267K/L368D/K370S-Fc(222)_IgG1_PVA_/S267K/S364K/E35 7Q
EVQLLESGGGLVQPGGSLRLSCAASGFTFSSYAMSWVRQAPGKGLEWVSVISGSGASTYYADSVKGRFTISRDNSKNTLYLQMNSLRAEDTAVYYCAKGYYFSRGFDYWGQGTLVTVSSASTKGPSVFPLAPSSKSTSGGTAALGCLVKDYFPEPVTVSWNSGALTSGVHTFPAVLQSSGLYSLSSVVTVPSSSLGTQTYICNVNHKPSNTKVDKKVEPKSCGGGGSGGGGSDIQLTQSPSSLSASVGDRVTITCRASSSVSYMHWYQQKPGKSPKPLIYATSNLASGVPARFSGSGSGTDYTLTISSLQPEDFATYYCQQWNSNPLTFGAGTKVEIKGKPGSGKPGSGKPGSGKPGSQVQLVQSGAEVKKPGASVKVSCKVSGFSLTSYGVHWIRQAPGQGLEWMGVIWAGGSTNYNSKFQGRVTMTKDNSKSTVYMELSSLRSEDTAVYYCARGGYEGAAWFGYWGQGTLVTVSSGGGGSGGGGSKTHTCPPCPAPPVAGPSVFLFPPKPKDTLMISRTPEVTCVVVDVKHEDPEVKFNWYVDGVEVHNAKTKPREEQYNSTYRVVSVLTVLHQDWLNGKEYKCKVSNKALPAPIEKTISKAKGQPREPQVYTLPPSREQMTKNQVKLTCLVKGFYPSDIAVEWESNGQPENNYKTTPPVLDSDGSFFLYSKLTVDKSRWQQGNVFSCSVMHEALHNHYTQKSLSLSPGK

SEQ ID NO: 1431 - protein, 214 aa, synthetic construct; identical to SEQ ID NO: 1428
  source 1..214: note = XENP33020 Chain 3 - 2E6A3.134A[B7H3]_H1L1_Fab-2E6A3.134A[B7H3]_H1L1_Fab_(G4S)2_ 6H7E7[NKG2D]_L1H1_scFv(GKPGS)4_(G4S)2-IgG1_pI(-)_Isosteric_ A_/PVA_/S267K/L368D/K370S-Fc(222)_IgG1_PVA_/S267K/S364K/E35 7Q

SEQ ID NO: 1432 - protein, 445 aa, synthetic construct
  source 1..445: note = XENP34452 Chain 1 - 115710[mNKG2D]_H0L0_IgG1_PVA_/S267K
QVQLQQSGAELVMPGSSVKVSCKASGYTFTDSTIHWVRQKPGQGLEWIGYVFPYNGNTQYNQNFQGKATLTADKSSSTAYMDLRSLTSEDSAVYYCGTNWSFDNWGQGTLVTVSSAKTTAPSVYPLAPVCGDTTGSSVTLGCLVKGYFPEPVTLTWNSGSLSSGVHTFPAVLQSDLYTLSSSVTVTSSTWPSQSITCNVAHPASSTKVDKKIEPRGPTIKPCPPCKCPAPNLLGGPSVFIFPPKIKDVLMISLSPMVTCVVVDVSEDDPDVQISWFVNNVEVLTAQTQTHREDYNSTLRVVSALPIQHQDWMSGKEFKCKVNNKALPAPIERTISKPKGSVRAPQVYVLPPPEEEMTKKQVTLTCMVTDFMPEDIYVEWTNNGKTELNYKNTEPVLDSDGSYFMYSKLRVEKKNWVERNSYSCSVVHEGLHNHHTTKSFSRTPGK

SEQ ID NO: 1433 - protein, 214 aa, synthetic construct
  source 1..214: note = XENP34452 Chain 2 - 115710[mNKG2D]_H0L0_IgG1_PVA_/S267K
DIQVTQSPTLLSASLGDEVTINCLASQDISHELNWYQQKSGHSPTLLIYNGENLQSGVPSRFIGRYSGRSFTLNISGVRPEDVATYFCLQHYSIPWTFGPGTKLEIKRTVAAPSVFIFPPSDEQLKSGTASVVCLLNNFYPREAKVQWKVDNALQSGNSQESVTEQDSKDSTYSLSSTLTLSKADYEKHKVYACEVTHQGLSSPVTKSFNRGEC

SEQ ID NO: 1434 - protein, 445 aa, synthetic construct
  source 1..445: note = XENP34453 Chain 1 - MAB0840[mNKG2D]_H0L0_IgG1_PVA_/S267K
QVQLVQSGAELKQPGQSVKISCKASGYTFTQYGMNWVKEAPGQGLKWMGWINTETGNPTYADDFKRRFVFSLDTSVSTAYLQISNFKNEDTATYYCVRYSYYFDSWGQGTMVTVSSASTKGPSVFPLAPSSKSTSGGTAALGCLVKDYFPEPVTVSWNSGALTSGVHTFPAVLQSSGLYSLSSVVTVPSSSLGTQTYICNVNHKPSNTKVDKKVEPKSCDKTHTCPPCPAPPVAGPSVFLFPPKPKDTLMISRTPEVTCVVVDVKHEDPEVKFNWYVDGVEVHNAKTKPREEQYNSTYRVVSVLTVLHQDWLNGKEYKCKVSNKALPAPIEKTISKAKGQPREPQVYTLPPSREEMTKNQVSLTCLVKGFYPSDIAVEWESNGQPENNYKTTPPVLDSDGSFFLYSKLTVDKSRWQQGNVFSCSVMHEALHNHYTQKSLSLSPGK

SEQ ID NO: 1435 - protein, 217 aa, synthetic construct
  source 1..217: note = XENP34453 Chain 2 - MAB0840[mNKG2D]_H0L0_IgG1_PVA_/S267K
QPVLTQSPSVSASLGASVKLTCTLSSRHSTYDIEWYQQHPHKTPKYVMYFKSDGSHSKGDGIPDRFSGSSSGAHRYLSISNLQPEDESIYYCGVSDNFLYGFGSGTQLTVLGQPKAAPSVTLFPPSSEELQANKATLVCLISDFYPGAVTVAWKADSSPVKAGVETTTPSKQSNNKYAASSYLSLTPEQWKSHRSYSCQVTHEGSTVEKTVAPTECS

SEQ ID NO: 1436 - protein, 450 aa, synthetic construct
  source 1..450: note = XENP38090 Chain 1 - ADI-27744_A44[NKG2D]_H0L0_IgG1_PVA_/S267K
EVQLLESGGGLVQPGGSLRLSCAASGFTFSSYAMSWVRQAPGKGLEWVSAISGSGGSTYYADSVKGRFTISRDNSKNTLYLQMNSLRAEDTAVYYCAKDGGYYDSGAGDYWGQGTLVTVSSASTKGPSVFPLAPSSKSTSGGTAALGCLVKDYFPEPVTVSWNSGALTSGVHTFPAVLQSSGLYSLSSVVTVPSSSLGTQTYICNVNHKPSNTKVDKKVEPKSCDKTHTCPPCPAPPVAGPSVFLFPPKPKDTLMISRTPEVTCVVVDVKHEDPEVKFNWYVDGVEVHNAKTKPREEQYNSTYRVVSVLTVLHQDWLNGKEYKCKVSNKALPAPIEKTISKAKGQPREPQVYTLPPSREEMTKNQVSLTCLVKGFYPSDIAVEWESNGQPENNYKTTPPVLDSDGSFFLYSKLTVDKSRWQQGNVFSCSVMHEALHNHYTQKSLSLSPGK

SEQ ID NO: 1437 - protein, 214 aa, synthetic construct; identical to SEQ ID NO: 173
  source 1..214: note = XENP38090 Chain 2 - ADI-27744_A44[NKG2D]_H0L0_IgG1_PVA_/S267K

SEQ ID NO: 1438 - protein, 451 aa, synthetic construct
  source 1..451: note = XENP38091 Chain 1 - ADI-27749_A49[NKG2D]_H0L0_IgG1_PVA_/S267K
EVQLVESGGGLVKPGGSLRLSCAASGFTFSSYSMNWVRQAPGKGLEWVSSISSSSSYIYYADSVKGRFTISRDNAKNSLYLQMNSLRAEDTAVYYCARGAPMGAAAGWFDPWGQGTLVTVSSASTKGPSVFPLAPSSKSTSGGTAALGCLVKDYFPEPVTVSWNSGALTSGVHTFPAVLQSSGLYSLSSVVTVPSSSLGTQTYICNVNHKPSNTKVDKKVEPKSCDKTHTCPPCPAPPVAGPSVFLFPPKPKDTLMISRTPEVTCVVVDVKHEDPEVKFNWYVDGVEVHNAKTKPREEQYNSTYRVVSVLTVLHQDWLNGKEYKCKVSNKALPAPIEKTISKAKGQPREPQVYTLPPSREEMTKNQVSLTCLVKGFYPSDIAVEWESNGQPENNYKTTPPVLDSDGSFFLYSKLTVDKSRWQQGNVFSCSVMHEALHNHYTQKSLSLSPGK

SEQ ID NO: 1439 - protein, 214 aa, synthetic construct; identical to SEQ ID NO: 176
  source 1..214: note = XENP38091 Chain 2 - ADI-27749_A49[NKG2D]_H0L0_IgG1_PVA_/S267K

SEQ ID NO: 1440 - protein, 446 aa, synthetic construct
  source 1..446: note = XENP38092 Chain 1 - ADI-18226_C26[NKG2D]_H0L0_IgG1_PVA_/S267K
QVQLQQWGAGLLKPSETLSLTCAVYGGSFSGYYWSWIRQPPGKGLEWIGEIDHSGSTNYNPSLKSRVTISVDTSKNQFSLKLSSVTAADTAVYYCARARGPWSFDPWGQGTLVTVSSASTKGPSVFPLAPSSKSTSGGTAALGCLVKDYFPEPVTVSWNSGALTSGVHTFPAVLQSSGLYSLSSVVTVPSSSLGTQTYICNVNHKPSNTKVDKKVEPKSCDKTHTCPPCPAPPVAGPSVFLFPPKPKDTLMISRTPEVTCVVVDVKHEDPEVKFNWYVDGVEVHNAKTKPREEQYNSTYRVVSVLTVLHQDWLNGKEYKCKVSNKALPAPIEKTISKAKGQPREPQVYTLPPSREEMTKNQVSLTCLVKGFYPSDIAVEWESNGQPENNYKTTPPVLDSDGSFFLYSKLTVDKSRWQQGNVFSCSVMHEALHNHYTQKSLSLSPGK

SEQ ID NO: 1441 - protein, 214 aa, synthetic construct
  source 1..214: note = XENP38092 Chain 2 - ADI-18226_C26[NKG2D]_H0L0_IgG1_PVA_/S267K
DIQMTQSPSTLSASVGDRVTITCRASQSISSWLAWYQQKPGKAPKLLIYKASSLESGVPSRFSGSGSGTEFTLTISSLQPDDFATYYCQQYGSFPITFGGGTKVEIKRTVAAPSVFIFPPSDEQLKSGTASVVCLLNNFYPREAKVQWKVDNALQSGNSQESVTEQDSKDSTYSLSSTLTLSKADYEKHKVYACEVTHQGLSSPVTKSFNRGEC

SEQ ID NO: 1442 - protein, 452 aa, synthetic construct
  source 1..452: note = XENP38095 Chain 1 - humON72[NKG2D]_H1L1_IgG1
QVQLVQSGAEVKKPGASVKVSCKASGYTFTNYWMHWVRQAPGQGLEWMGEIDPSDIYTNYAQKFQGRVTMTRDTSTSTVYMELSSLRSEDTAVYYCARGIYDGYYVYGMDYWGQGTTVTVSSASTKGPSVFPLAPSSKSTSGGTAALGCLVKDYFPEPVTVSWNSGALTSGVHTFPAVLQSSGLYSLSSVVTVPSSSLGTQTYICNVNHKPSNTKVDKKVEPKSCDKTHTCPPCPAPELLGGPSVFLFPPKPKDTLMISRTPEVTCVVVDVSHEDPEVKFNWYVDGVEVHNAKTKPREEQYNSTYRVVSVLTVLHQDWLNGKEYKCKVSNKALPAPIEKTISKAKGQPREPQVYTLPPSREEMTKNQVSLTCLVKGFYPSDIAVEWESNGQPENNYKTTPPVLDSDGSFFLYSKLTVDKSRWQQGNVFSCSVMHEALHNHYTQKSLSLSPGK

SEQ ID NO: 1443 - protein, 214 aa, synthetic construct; identical to SEQ ID NO: 13
  source 1..214: note = XENP38095 Chain 2 - humON72[NKG2D]_H1L1_IgG1

SEQ ID NO: 1444 - protein, 450 aa, synthetic construct
  source 1..450: note = XENP38096 Chain 1 - 6E5A7[NKG2D]_H2L1_IgG1
QVQLVQSGAEVKKPGASVKVSCKVSGFSLTIYGVHWVRQAPGQGLEWMGVIWSGGSTDYNAKFQGRVTMTKDNSKRTVYMELSSLRSEDTAVYYCSRKSHDGYYGVMDYWGQGTTVTVSSASTKGPSVFPLAPSSKSTSGGTAALGCLVKDYFPEPVTVSWNSGALTSGVHTFPAVLQSSGLYSLSSVVTVPSSSLGTQTYICNVNHKPSNTKVDKKVEPKSCDKTHTCPPCPAPELLGGPSVFLFPPKPKDTLMISRTPEVTCVVVDVSHEDPEVKFNWYVDGVEVHNAKTKPREEQYNSTYRVVSVLTVLHQDWLNGKEYKCKVSNKALPAPIEKTISKAKGQPREPQVYTLPPSREEMTKNQVSLTCLVKGFYPSDIAVEWESNGQPENNYKTTPPVLDSDGSFFLYSKLTVDKSRWQQGNVFSCSVMHEALHNHYTQKSLSLSPGK

SEQ ID NO: 1445 - protein, 214 aa, synthetic construct; identical to SEQ ID NO: 15
  source 1..214: note = XENP38096 Chain 2 - 6E5A7[NKG2D]_H2L1_IgG1

SEQ ID NO: 1446 - protein, 447 aa, synthetic construct
  source 1..447: note = XENP38099 Chain 1 - ADI-18226_C26[NKG2D]_H0L0_IgG1
QVQLQQWGAGLLKPSETLSLTCAVYGGSFSGYYWSWIRQPPGKGLEWIGEIDHSGSTNYNPSLKSRVTISVDTSKNQFSLKLSSVTAADTAVYYCARARGPWSFDPWGQGTLVTVSSASTKGPSVFPLAPSSKSTSGGTAALGCLVKDYFPEPVTVSWNSGALTSGVHTFPAVLQSSGLYSLSSVVTVPSSSLGTQTYICNVNHKPSNTKVDKKVEPKSCDKTHTCPPCPAPELLGGPSVFLFPPKPKDTLMISRTPEVTCVVVDVSHEDPEVKFNWYVDGVEVHNAKTKPREEQYNSTYRVVSVLTVLHQDWLNGKEYKCKVSNKALPAPIEKTISKAKGQPREPQVYTLPPSREEMTKNQVSLTCLVKGFYPSDIAVEWESNGQPENNYKTTPPVLDSDGSFFLYSKLTVDKSRWQQGNVFSCSVMHEALHNHYTQKSLSLSPGK

SEQ ID NO: 1447 - protein, 214 aa, synthetic construct; identical to SEQ ID NO: 1441
  source 1..214: note = XENP38099 Chain 2 - ADI-18226_C26[NKG2D]_H0L0_IgG1

SEQ ID NO: 1448 - protein, 450 aa, synthetic construct; identical to SEQ ID NO: 1356
  source 1..450: note = XENP38100 Chain 1 - 1D2B4[NKG2D]_H1L1_Fab-2E4A3.189[B7H3]_H1.22_L1_scFv(GKPGS)4 -IgG1_pI(-)_Isosteric_A_PVA_/S267K/L368D/K370S-Fc(216)_IgG1 _C220S/PVA_/S267K/S364K/E357Q

SEQ ID NO: 1449 - protein, 477 aa, synthetic construct; identical to SEQ ID NO: 8
  source 1..477: note = XENP38100 Chain 2 - 1D2B4[NKG2D]_H1L1_Fab-2E4A3.189[B7H3]_H1.22_L1_scFv(GKPGS)4 -IgG1_pI(-)_Isosteric_A_PVA_/S267K/L368D/K370S-Fc(216)_IgG1 _C220S/PVA_/S267K/S364K/E357Q

SEQ ID NO: 1450 - protein, 214 aa, synthetic construct; identical to SEQ ID NO: 3
  source 1..214: note = XENP38100 Chain 3 - 1D2B4[NKG2D]_H1L1_Fab-2E4A3.189[B7H3]_H1.22_L1_scFv(GKPGS)4 -IgG1_pI(-)_Isosteric_A_PVA_/S267K/L368D/K370S-Fc(216)_IgG1 _C220S/PVA_/S267K/S364K/E357Q

SEQ ID NO: 1451 - protein, 451 aa, synthetic construct
  source 1..451: note = XENP38102 Chain 1 - humON72[NKG2D]_H1L1_Fab-2E4A3.189[B7H3]_H1.22_L1_scFv(GKPGS )4-IgG1_pI(-)_Isosteric_A_PVA_/S267K/L368D/K370S-Fc(216)_Ig G1_C220S/PVA_/S267K/S364K/E357Q
QVQLVQSGAEVKKPGASVKVSCKASGYTFTNYWMHWVRQAPGQGLEWMGEIDPSDIYTNYAQKFQGRVTMTRDTSTSTVYMELSSLRSEDTAVYYCARGIYDGYYVYGMDYWGQGTTVTVSSASTKGPSVFPLAPSSKSTSGGTAALGCLVKDYFPEPVTVSWNSGALTSGVHTFPAVLQSSGLYSLSSVVTVPSSSLGTQTYICNVNHKPSDTKVDKKVEPKSCDKTHTCPPCPAPPVAGPSVFLFPPKPKDTLMISRTPEVTCVVVDVKHEDPEVKFNWYVDGVEVHNAKTKPREEEYNSTYRVVSVLTVLHQDWLNGKEYKCKVSNKALPAPIEKTISKAKGQPREPQVYTLPPSREEMTKNQVSLTCDVSGFYPSDIAVEWESDGQPENNYKTTPPVLDSDGSFFLYSKLTVDKSRWEQGDVFSCSVMHEALHNHYTQKSLSLSPGK

SEQ ID NO: 1452 - protein, 477 aa, synthetic construct; identical to SEQ ID NO: 8
  source 1..477: note = XENP38102 Chain 2 - humON72[NKG2D]_H1L1_Fab-2E4A3.189[B7H3]_H1.22_L1_scFv(GKPGS )4-IgG1_pI(-)_Isosteric_A_PVA_/S267K/L368D/K370S-Fc(216)_Ig G1_C220S/PVA_/S267K/S364K/E357Q

SEQ ID NO: 1453 - protein, 214 aa, synthetic construct; identical to SEQ ID NO: 13
  source 1..214: note = XENP38102 Chain 3 - humON72[NKG2D]_H1L1_Fab-2E4A3.189[B7H3]_H1.22_L1_scFv(GKPGS )4-IgG1_pI(-)_Isosteric_A_PVA_/S267K/L368D/K370S-Fc(216)_Ig G1_C220S/PVA_/S267K/S364K/E357Q

SEQ ID NO: 1454 - protein, 449 aa, synthetic construct
  source 1..449: note = XENP38103 Chain 1 - 6E5A7[NKG2D]_H2L1_Fab-2E4A3.189[B7H3]_H1.22_L1_scFv(GKPGS)4 -IgG1_pI(-)_Isosteric_A_PVA_/S267K/L368D/K370S-Fc(216)_IgG1 _C220S/PVA_/S267K/S364K/E357Q
QVQLVQSGAEVKKPGASVKVSCKVSGFSLTIYGVHWVRQAPGQGLEWMGVIWSGGSTDYNAKFQGRVTMTKDNSKRTVYMELSSLRSEDTAVYYCSRKSHDGYYGVMDYWGQGTTVTVSSASTKGPSVFPLAPSSKSTSGGTAALGCLVKDYFPEPVTVSWNSGALTSGVHTFPAVLQSSGLYSLSSVVTVPSSSLGTQTYICNVNHKPSDTKVDKKVEPKSCDKTHTCPPCPAPPVAGPSVFLFPPKPKDTLMISRTPEVTCVVVDVKHEDPEVKFNWYVDGVEVHNAKTKPREEEYNSTYRVVSVLTVLHQDWLNGKEYKCKVSNKALPAPIEKTISKAKGQPREPQVYTLPPSREEMTKNQVSLTCDVSGFYPSDIAVEWESDGQPENNYKTTPPVLDSDGSFFLYSKLTVDKSRWEQGDVFSCSVMHEALHNHYTQKSLSLSPGK

SEQ ID NO: 1455 - protein, 477 aa, synthetic construct; identical to SEQ ID NO: 8
  source 1..477: note = XENP38103 Chain 2 - 6E5A7[NKG2D]_H2L1_Fab-2E4A3.189[B7H3]_H1.22_L1_scFv(GKPGS)4 -IgG1_pI(-)_Isosteric_A_PVA_/S267K/L368D/K370S-Fc(216)_IgG1 _C220S/PVA_/S267K/S364K/E357Q

SEQ ID NO: 1456 - protein, 214 aa, synthetic construct; identical to SEQ ID NO: 15
  source 1..214: note = XENP38103 Chain 3 - 6E5A7[NKG2D]_H2L1_Fab-2E4A3.189[B7H3]_H1.22_L1_scFv(GKPGS)4 -IgG1_pI(-)_Isosteric_A_PVA_/S267K/L368D/K370S-Fc(216)_IgG1 _C220S/PVA_/S267K/S364K/E357Q

SEQ ID NO: 1457 - protein, 450 aa, synthetic construct
  source 1..450: note = XENP38104 Chain 1 - ADI-27744_A44[NKG2D]_H0L0_Fab-2E4A3.189[B7H3]_H1.22_L1_scFv (GKPGS)4-IgG1_pI(-)_Isosteric_A_PVA_/S267K/L368D/K370S-Fc(2 16)_IgG1_C220S/PVA_/S267K/S364K/E357Q
EVQLLESGGGLVQPGGSLRLSCAASGFTFSSYAMSWVRQAPGKGLEWVSAISGSGGSTYYADSVKGRFTISRDNSKNTLYLQMNSLRAEDTAVYYCAKDGGYYDSGAGDYWGQGTLVTVSSASTKGPSVFPLAPSSKSTSGGTAALGCLVKDYFPEPVTVSWNSGALTSGVHTFPAVLQSSGLYSLSSVVTVPSSSLGTQTYICNVNHKPSDTKVDKKVEPKSCDKTHTCPPCPAPPVAGPSVFLFPPKPKDTLMISRTPEVTCVVVDVKHEDPEVKFNWYVDGVEVHNAKTKPREEEYNSTYRVVSVLTVLHQDWLNGKEYKCKVSNKALPAPIEKTISKAKGQPREPQVYTLPPSREEMTKNQVSLTCDVSGFYPSDIAVEWESDGQPENNYKTTPPVLDSDGSFFLYSKLTVDKSRWEQGDVFSCSVMHEALHNHYTQKSLSLSPGK

SEQ ID NO: 1458 - protein, 477 aa, synthetic construct; identical to SEQ ID NO: 8
  source 1..477: note = XENP38104 Chain 2 - ADI-27744_A44[NKG2D]_H0L0_Fab-2E4A3.189[B7H3]_H1.22_L1_scFv (GKPGS)4-IgG1_pI(-)_Isosteric_A_PVA_/S267K/L368D/K370S-Fc(2 16)_IgG1_C220S/PVA_/S267K/S364K/E357Q

SEQ ID NO: 1459 - protein, 214 aa, synthetic construct; identical to SEQ ID NO: 173
  source 1..214: note = XENP38104 Chain 3 - ADI-27744_A44[NKG2D]_H0L0_Fab-2E4A3.189[B7H3]_H1.22_L1_scFv (GKPGS)4-IgG1_pI(-)_Isosteric_A_PVA_/S267K/L368D/K370S-Fc(2 16)_IgG1_C220S/PVA_/S267K/S364K/E357Q

SEQ ID NO: 1460 - protein, 451 aa, synthetic construct
  source 1..451: note = XENP38105 Chain 1 - ADI-27749_A49[NKG2D]_H0L0_Fab-2E4A3.189[B7H3]_H1.22_L1_scFv (GKPGS)4-IgG1_pI(-)_Isosteric_A_PVA_/S267K/L368D/K370S-Fc(2 16)_IgG1_C220S/PVA_/S267K/S364K/E357Q
EVQLVESGGGLVKPGGSLRLSCAASGFTFSSYSMNWVRQAPGKGLEWVSSISSSSSYIYYADSVKGRFTISRDNAKNSLYLQMNSLRAEDTAVYYCARGAPMGAAAGWFDPWGQGTLVTVSSASTKGPSVFPLAPSSKSTSGGTAALGCLVKDYFPEPVTVSWNSGALTSGVHTFPAVLQSSGLYSLSSVVTVPSSSLGTQTYICNVNHKPSDTKVDKKVEPKSCDKTHTCPPCPAPPVAGPSVFLFPPKPKDTLMISRTPEVTCVVVDVKHEDPEVKFNWYVDGVEVHNAKTKPREEEYNSTYRVVSVLTVLHQDWLNGKEYKCKVSNKALPAPIEKTISKAKGQPREPQVYTLPPSREEMTKNQVSLTCDVSGFYPSDIAVEWESDGQPENNYKTTPPVLDSDGSFFLYSKLTVDKSRWEQGDVFSCSVMHEALHNHYTQKSLSLSPGK

SEQ ID NO: 1461 - protein, 477 aa, synthetic construct; identical to SEQ ID NO: 8
  source 1..477: note = XENP38105 Chain 2 - ADI-27749_A49[NKG2D]_H0L0_Fab-2E4A3.189[B7H3]_H1.22_L1_scFv (GKPGS)4-IgG1_pI(-)_Isosteric_A_PVA_/S267K/L368D/K370S-Fc(2 16)_IgG1_C220S/PVA_/S267K/S364K/E357Q

SEQ ID NO: 1462 - protein, 214 aa, synthetic construct; identical to SEQ ID NO: 176
  source 1..214: note = XENP38105 Chain 3 - ADI-27749_A49[NKG2D]_H0L0_Fab-2E4A3.189[B7H3]_H1.22_L1_scFv (GKPGS)4-IgG1_pI(-)_Isosteric_A_PVA_/S267K/L368D/K370S-Fc(2 16)_IgG1_C220S/PVA_/S267K/S364K/E357Q

SEQ ID NO: 1463 - protein, 446 aa, synthetic construct
  source 1..446: note = XENP38106 Chain 1 - ADI-18226_C26[NKG2D]_H0L0_Fab-2E4A3.189[B7H3]_H1.22_L1_scFv (GKPGS)4-IgG1_pI(-)_Isosteric_A_PVA_/S267K/L368D/K370S-Fc(2 16)_IgG1_C220S/PVA_/S267K/S364K/E357Q
QVQLQQWGAGLLKPSETLSLTCAVYGGSFSGYYWSWIRQPPGKGLEWIGEIDHSGSTNYNPSLKSRVTISVDTSKNQFSLKLSSVTAADTAVYYCARARGPWSFDPWGQGTLVTVSSASTKGPSVFPLAPSSKSTSGGTAALGCLVKDYFPEPVTVSWNSGALTSGVHTFPAVLQSSGLYSLSSVVTVPSSSLGTQTYICNVNHKPSDTKVDKKVEPKSCDKTHTCPPCPAPPVAGPSVFLFPPKPKDTLMISRTPEVTCVVVDVKHEDPEVKFNWYVDGVEVHNAKTKPREEEYNSTYRVVSVLTVLHQDWLNGKEYKCKVSNKALPAPIEKTISKAKGQPREPQVYTLPPSREEMTKNQVSLTCDVSGFYPSDIAVEWESDGQPENNYKTTPPVLDSDGSFFLYSKLTVDKSRWEQGDVFSCSVMHEALHNHYTQKSLSLSPGK

SEQ ID NO: 1464 - protein, 477 aa, synthetic construct; identical to SEQ ID NO: 8
  source 1..477: note = XENP38106 Chain 2 - ADI-18226_C26[NKG2D]_H0L0_Fab-2E4A3.189[B7H3]_H1.22_L1_scFv (GKPGS)4-IgG1_pI(-)_Isosteric_A_PVA_/S267K/L368D/K370S-Fc(2 16)_IgG1_C220S/PVA_/S267K/S364K/E357Q

SEQ ID NO: 1465 - protein, 214 aa, synthetic construct; identical to SEQ ID NO: 1441
  source 1..214: note = XENP38106 Chain 3 - ADI-18226_C26[NKG2D]_H0L0_Fab-2E4A3.189[B7H3]_H1.22_L1_scFv (GKPGS)4-IgG1_pI(-)_Isosteric_A_PVA_/S267K/L368D/K370S-Fc(2 16)_IgG1_C220S/PVA_/S267K/S364K/E357Q

SEQ ID NO: 1466 - protein, 451 aa, synthetic construct
  source 1..451: note = XENP38107 Chain 1 - 1D2B4[NKG2D]_H1L1_Fab-2E4A3.189[B7H3]_H1.22_L1_scFv(GKPGS)4 -IgG1_pI(-)_Isosteric_A_L368D/K370S-Fc(216)_IgG1_C220S/S364 K/E357Q
EVQLLESGGGLVQPGGSLRLSCAASGFTFSSFGMSWVRQAPGKGLEWVSTISGSGSTTYYADSVKGRFTISRDNSKNTLYLQMNSLRAEDTAVYYCAKGVFSEWHYYFDYWGQGTLVTVSSASTKGPSVFPLAPSSKSTSGGTAALGCLVKDYFPEPVTVSWNSGALTSGVHTFPAVLQSSGLYSLSSVVTVPSSSLGTQTYICNVNHKPSDTKVDKKVEPKSCDKTHTCPPCPAPELLGGPSVFLFPPKPKDTLMISRTPEVTCVVVDVSHEDPEVKFNWYVDGVEVHNAKTKPREEEYNSTYRVVSVLTVLHQDWLNGKEYKCKVSNKALPAPIEKTISKAKGQPREPQVYTLPPSREEMTKNQVSLTCDVSGFYPSDIAVEWESDGQPENNYKTTPPVLDSDGSFFLYSKLTVDKSRWEQGDVFSCSVMHEALHNHYTQKSLSLSPGK

SEQ ID NO: 1467 - protein, 478 aa, synthetic construct; identical to SEQ ID NO: 10
  source 1..478: note = XENP38107 Chain 2 - 1D2B4[NKG2D]_H1L1_Fab-2E4A3.189[B7H3]_H1.22_L1_scFv(GKPGS)4 -IgG1_pI(-)_Isosteric_A_L368D/K370S-Fc(216)_IgG1_C220S/S364 K/E357Q

SEQ ID NO: 1468 - protein, 214 aa, synthetic construct; identical to SEQ ID NO: 3
  source 1..214: note = XENP38107 Chain 3 - 1D2B4[NKG2D]_H1L1_Fab-2E4A3.189[B7H3]_H1.22_L1_scFv(GKPGS)4 -IgG1_pI(-)_Isosteric_A_L368D/K370S-Fc(216)_IgG1_C220S/S364 K/E357Q

SEQ ID NO: 1469 - protein, 452 aa, synthetic construct
  source 1..452: note = XENP38109 Chain 1 - humON72[NKG2D]_H1L1_Fab-2E4A3.189[B7H3]_H1.22_L1_scFv(GKPGS )4-IgG1_pI(-)_Isosteric_A_L368D/K370S-Fc(216)_IgG1_C220S/S3 64K/E357Q
QVQLVQSGAEVKKPGASVKVSCKASGYTFTNYWMHWVRQAPGQGLEWMGEIDPSDIYTNYAQKFQGRVTMTRDTSTSTVYMELSSLRSEDTAVYYCARGIYDGYYVYGMDYWGQGTTVTVSSASTKGPSVFPLAPSSKSTSGGTAALGCLVKDYFPEPVTVSWNSGALTSGVHTFPAVLQSSGLYSLSSVVTVPSSSLGTQTYICNVNHKPSDTKVDKKVEPKSCDKTHTCPPCPAPELLGGPSVFLFPPKPKDTLMISRTPEVTCVVVDVSHEDPEVKFNWYVDGVEVHNAKTKPREEEYNSTYRVVSVLTVLHQDWLNGKEYKCKVSNKALPAPIEKTISKAKGQPREPQVYTLPPSREEMTKNQVSLTCDVSGFYPSDIAVEWESDGQPENNYKTTPPVLDSDGSFFLYSKLTVDKSRWEQGDVFSCSVMHEALHNHYTQKSLSLSPGK

SEQ ID NO: 1470 - protein, 478 aa, synthetic construct; identical to SEQ ID NO: 10
  source 1..478: note = XENP38109 Chain 2 - humON72[NKG2D]_H1L1_Fab-2E4A3.189[B7H3]_H1.22_L1_scFv(GKPGS )4-IgG1_pI(-)_Isosteric_A_L368D/K370S-Fc(216)_IgG1_C220S/S3 64K/E357Q

SEQ ID NO: 1471 - protein, 214 aa, synthetic construct; identical to SEQ ID NO: 13
  source 1..214: note = XENP38109 Chain 3 - humON72[NKG2D]_H1L1_Fab-2E4A3.189[B7H3]_H1.22_L1_scFv(GKPGS )4-IgG1_pI(-)_Isosteric_A_L368D/K370S-Fc(216)_IgG1_C220S/S3 64K/E357Q

SEQ ID NO: 1472 - protein, 450 aa, synthetic construct
  source 1..450: note = XENP38110 Chain 1 - 6E5A7[NKG2D]_H2L1_Fab-2E4A3.189[B7H3]_H1.22_L1_scFv(GKPGS)4 -IgG1_pI(-)_Isosteric_A_L368D/K370S-Fc(216)_IgG1_C220S/S364 K/E357Q
QVQLVQSGAEVKKPGASVKVSCKVSGFSLTIYGVHWVRQAPGQGLEWMGVIWSGGSTDYNAKFQGRVTMTKDNSKRTVYMELSSLRSEDTAVYYCSRKSHDGYYGVMDYWGQGTTVTVSSASTKGPSVFPLAPSSKSTSGGTAALGCLVKDYFPEPVTVSWNSGALTSGVHTFPAVLQSSGLYSLSSVVTVPSSSLGTQTYICNVNHKPSDTKVDKKVEPKSCDKTHTCPPCPAPELLGGPSVFLFPPKPKDTLMISRTPEVTCVVVDVSHEDPEVKFNWYVDGVEVHNAKTKPREEEYNSTYRVVSVLTVLHQDWLNGKEYKCKVSNKALPAPIEKTISKAKGQPREPQVYTLPPSREEMTKNQVSLTCDVSGFYPSDIAVEWESDGQPENNYKTTPPVLDSDGSFFLYSKLTVDKSRWEQGDVFSCSVMHEALHNHYTQKSLSLSPGK

SEQ ID NO: 1473 - protein, 478 aa, synthetic construct; identical to SEQ ID NO: 10
  source 1..478: note = XENP38110 Chain 2 - 6E5A7[NKG2D]_H2L1_Fab-2E4A3.189[B7H3]_H1.22_L1_scFv(GKPGS)4 -IgG1_pI(-)_Isosteric_A_L368D/K370S-Fc(216)_IgG1_C220S/S364 K/E357Q

SEQ ID NO: 1474 - protein, 214 aa, synthetic construct; identical to SEQ ID NO: 15
  source 1..214: note = XENP38110 Chain 3 - 6E5A7[NKG2D]_H2L1_Fab-2E4A3.189[B7H3]_H1.22_L1_scFv(GKPGS)4 -IgG1_pI(-)_Isosteric_A_L368D/K370S-Fc(216)_IgG1_C220S/S364 K/E357Q

SEQ ID NO: 1475 - protein, 451 aa, synthetic construct
  source 1..451: note = XENP38111 Chain 1 - ADI-27744_A44[NKG2D]_H0L0_Fab-2E4A3.189[B7H3]_H1.22_L1_scFv (GKPGS)4-IgG1_pI(-)_Isosteric_A_L368D/K370S-Fc(216)_IgG1_C2 20S/S364K/E357Q
EVQLLESGGGLVQPGGSLRLSCAASGFTFSSYAMSWVRQAPGKGLEWVSAISGSGGSTYYADSVKGRFTISRDNSKNTLYLQMNSLRAEDTAVYYCAKDGGYYDSGAGDYWGQGTLVTVSSASTKGPSVFPLAPSSKSTSGGTAALGCLVKDYFPEPVTVSWNSGALTSGVHTFPAVLQSSGLYSLSSVVTVPSSSLGTQTYICNVNHKPSDTKVDKKVEPKSCDKTHTCPPCPAPELLGGPSVFLFPPKPKDTLMISRTPEVTCVVVDVSHEDPEVKFNWYVDGVEVHNAKTKPREEEYNSTYRVVSVLTVLHQDWLNGKEYKCKVSNKALPAPIEKTISKAKGQPREPQVYTLPPSREEMTKNQVSLTCDVSGFYPSDIAVEWESDGQPENNYKTTPPVLDSDGSFFLYSKLTVDKSRWEQGDVFSCSVMHEALHNHYTQKSLSLSPGK

SEQ ID NO: 1476 - protein, 478 aa, synthetic construct; identical to SEQ ID NO: 10
  source 1..478: note = XENP38111 Chain 2 - ADI-27744_A44[NKG2D]_H0L0_Fab-2E4A3.189[B7H3]_H1.22_L1_scFv (GKPGS)4-IgG1_pI(-)_Isosteric_A_L368D/K370S-Fc(216)_IgG1_C2 20S/S364K/E357Q

SEQ ID NO: 1477 - protein, 214 aa, synthetic construct; identical to SEQ ID NO: 173
  source 1..214: note = XENP38111 Chain 3 - ADI-27744_A44[NKG2D]_H0L0_Fab-2E4A3.189[B7H3]_H1.22_L1_scFv (GKPGS)4-IgG1_pI(-)_Isosteric_A_L368D/K370S-Fc(216)_IgG1_C2 20S/S364K/E357Q

SEQ ID NO: 1478 - protein, 452 aa, synthetic construct
  source 1..452: note = XENP38112 Chain 1 - ADI-27749_A49[NKG2D]_H0L0_Fab-2E4A3.189[B7H3]_H1.22_L1_scFv (GKPGS)4-IgG1_pI(-)_Isosteric_A_L368D/K370S-Fc(216)_IgG1_C2 20S/S364K/E357Q
EVQLVESGGGLVKPGGSLRLSCAASGFTFSSYSMNWVRQAPGKGLEWVSSISSSSSYIYYADSVKGRFTISRDNAKNSLYLQMNSLRAEDTAVYYCARGAPMGAAAGWFDPWGQGTLVTVSSASTKGPSVFPLAPSSKSTSGGTAALGCLVKDYFPEPVTVSWNSGALTSGVHTFPAVLQSSGLYSLSSVVTVPSSSLGTQTYICNVNHKPSDTKVDKKVEPKSCDKTHTCPPCPAPELLGGPSVFLFPPKPKDTLMISRTPEVTCVVVDVSHEDPEVKFNWYVDGVEVHNAKTKPREEEYNSTYRVVSVLTVLHQDWLNGKEYKCKVSNKALPAPIEKTISKAKGQPREPQVYTLPPSREEMTKNQVSLTCDVSGFYPSDIAVEWESDGQPENNYKTTPPVLDSDGSFFLYSKLTVDKSRWEQGDVFSCSVMHEALHNHYTQKSLSLSPGK

SEQ ID NO: 1479 - protein, 478 aa, synthetic construct; identical to SEQ ID NO: 10
  source 1..478: note = XENP38112 Chain 2 - ADI-27749_A49[NKG2D]_H0L0_Fab-2E4A3.189[B7H3]_H1.22_L1_scFv (GKPGS)4-IgG1_pI(-)_Isosteric_A_L368D/K370S-Fc(216)_IgG1_C2 20S/S364K/E357Q

SEQ ID NO: 1480 - protein, 214 aa, synthetic construct; identical to SEQ ID NO: 176
  source 1..214: note = XENP38112 Chain 3 - ADI-27749_A49[NKG2D]_H0L0_Fab-2E4A3.189[B7H3]_H1.22_L1_scFv (GKPGS)4-IgG1_pI(-)_Isosteric_A_L368D/K370S-Fc(216)_IgG1_C2 20S/S364K/E357Q

SEQ ID NO: 1481 - protein, 447 aa, synthetic construct
  source 1..447: note = XENP38113 Chain 1 - ADI-18226_C26[NKG2D]_H0L0_Fab-2E4A3.189[B7H3]_H1.22_L1_scFv (GKPGS)4-IgG1_pI(-)_Isosteric_A_L368D/K370S-Fc(216)_IgG1_C2 20S/S364K/E357Q
QVQLQQWGAGLLKPSETLSLTCAVYGGSFSGYYWSWIRQPPGKGLEWIGEIDHSGSTNYNPSLKSRVTISVDTSKNQFSLKLSSVTAADTAVYYCARARGPWSFDPWGQGTLVTVSSASTKGPSVFPLAPSSKSTSGGTAALGCLVKDYFPEPVTVSWNSGALTSGVHTFPAVLQSSGLYSLSSVVTVPSSSLGTQTYICNVNHKPSDTKVDKKVEPKSCDKTHTCPPCPAPELLGGPSVFLFPPKPKDTLMISRTPEVTCVVVDVSHEDPEVKFNWYVDGVEVHNAKTKPREEEYNSTYRVVSVLTVLHQDWLNGKEYKCKVSNKALPAPIEKTISKAKGQPREPQVYTLPPSREEMTKNQVSLTCDVSGFYPSDIAVEWESDGQPENNYKTTPPVLDSDGSFFLYSKLTVDKSRWEQGDVFSCSVMHEALHNHYTQKSLSLSPGK

SEQ ID NO: 1482 - protein, 478 aa, synthetic construct; identical to SEQ ID NO: 10
  source 1..478: note = XENP38113 Chain 2 - ADI-18226_C26[NKG2D]_H0L0_Fab-2E4A3.189[B7H3]_H1.22_L1_scFv (GKPGS)4-IgG1_pI(-)_Isosteric_A_L368D/K370S-Fc(216)_IgG1_C2 20S/S364K/E357Q

SEQ ID NO: 1483 - protein, 214 aa, synthetic construct; identical to SEQ ID NO: 1441
  source 1..214: note = XENP38113 Chain 3 - ADI-18226_C26[NKG2D]_H0L0_Fab-2E4A3.189[B7H3]_H1.22_L1_scFv (GKPGS)4-IgG1_pI(-)_Isosteric_A_L368D/K370S-Fc(216)_IgG1_C2 20S/S364K/E357Q

SEQ ID NO: 1484 - protein, 447 aa, synthetic construct
  source 1..447: note = XENP38572 Chain 1 - ADI-18226_C26[NKG2D]_H0_L0_IgG1_S239D/I332E
QVQLQQWGAGLLKPSETLSLTCAVYGGSFSGYYWSWIRQPPGKGLEWIGEIDHSGSTNYNPSLKSRVTISVDTSKNQFSLKLSSVTAADTAVYYCARARGPWSFDPWGQGTLVTVSSASTKGPSVFPLAPSSKSTSGGTAALGCLVKDYFPEPVTVSWNSGALTSGVHTFPAVLQSSGLYSLSSVVTVPSSSLGTQTYICNVNHKPSNTKVDKKVEPKSCDKTHTCPPCPAPELLGGPDVFLFPPKPKDTLMISRTPEVTCVVVDVSHEDPEVKFNWYVDGVEVHNAKTKPREEQYNSTYRVVSVLTVLHQDWLNGKEYKCKVSNKALPAPEEKTISKAKGQPREPQVYTLPPSREEMTKNQVSLTCLVKGFYPSDIAVEWESNGQPENNYKTTPPVLDSDGSFFLYSKLTVDKSRWQQGNVFSCSVMHEALHNHYTQKSLSLSPGK

SEQ ID NO: 1485 - protein, 214 aa, synthetic construct; identical to SEQ ID NO: 1441
  source 1..214: note = XENP38572 Chain 2 - ADI-18226_C26[NKG2D]_H0_L0_IgG1_S239D/I332E

SEQ ID NO: 1486 - protein, 447 aa, synthetic construct; identical to SEQ ID NO: 1481
  source 1..447: note = XENP38573 Chain 1 - ADI-18226_C26[NKG2D]_H0_L0-Numax_VHVL_scFv(GKPGS)4-IgG1_pI( -)_Isosteric_A_L368D/K370S-Fc(216)_IgG1_C220S/S364K/E357Q

SEQ ID NO: 1487 - protein, 478 aa, synthetic construct; identical to SEQ ID NO: 1033
  source 1..478: note = XENP38573 Chain 2 - ADI-18226_C26[NKG2D]_H0_L0-Numax_VHVL_scFv(GKPGS)4-IgG1_pI( -)_Isosteric_A_L368D/K370S-Fc(216)_IgG1_C220S/S364K/E357Q

SEQ ID NO: 1488 - protein, 214 aa, synthetic construct; identical to SEQ ID NO: 1441
  source 1..214: note = XENP38573 Chain 3 - ADI-18226_C26[NKG2D]_H0_L0-Numax_VHVL_scFv(GKPGS)4-IgG1_pI( -)_Isosteric_A_L368D/K370S-Fc(216)_IgG1_C220S/S364K/E357Q

SEQ ID NO: 1489 - protein, 446 aa, synthetic construct; identical to SEQ ID NO: 1463
  source 1..446: note = XENP38574 Chain 1 - ADI-18226_C26[NKG2D]_H0_L0-Numax_VHVL_scFv(GKPGS)4-IgG1_pI( -)_Isosteric_A_PVA_/S267K/L368D/K370S-Fc(216)_IgG1_C220S/PV A_/S267K/S364K/E357Q

SEQ ID NO: 1490 - protein, 477 aa, synthetic construct; identical to SEQ ID NO: 1097
  source 1..477: note = XENP38574 Chain 2 - ADI-18226_C26[NKG2D]_H0_L0-Numax_VHVL_scFv(GKPGS)4-IgG1_pI( -)_Isosteric_A_PVA_/S267K/L368D/K370S-Fc(216)_IgG1_C220S/PV A_/S267K/S364K/E357Q

SEQ ID NO: 1491 - protein, 214 aa, synthetic construct; identical to SEQ ID NO: 1441
  source 1..214: note = XENP38574 Chain 3 - ADI-18226_C26[NKG2D]_H0_L0-Numax_VHVL_scFv(GKPGS)4-IgG1_pI( -)_Isosteric_A_PVA_/S267K/L368D/K370S-Fc(216)_IgG1_C220S/PV A_/S267K/S364K/E357Q

SEQ ID NO: 1492 - protein, 447 aa, synthetic construct
  source 1..447: note = XENP38576 Chain 1 - ADI-18226_C26[NKG2D]_H0_L0_Fab-2E4A3.189[B7H3]_H1.22_L1_scF v(GKPGS)4-IgG1_pI(-)_Isosteric_A_S239D/I332E/L368D/K370S-Fc (216)_IgG1_C220S/S239D/I332E/S364K/E357Q
QVQLQQWGAGLLKPSETLSLTCAVYGGSFSGYYWSWIRQPPGKGLEWIGEIDHSGSTNYNPSLKSRVTISVDTSKNQFSLKLSSVTAADTAVYYCARARGPWSFDPWGQGTLVTVSSASTKGPSVFPLAPSSKSTSGGTAALGCLVKDYFPEPVTVSWNSGALTSGVHTFPAVLQSSGLYSLSSVVTVPSSSLGTQTYICNVNHKPSDTKVDKKVEPKSCDKTHTCPPCPAPELLGGPDVFLFPPKPKDTLMISRTPEVTCVVVDVSHEDPEVKFNWYVDGVEVHNAKTKPREEEYNSTYRVVSVLTVLHQDWLNGKEYKCKVSNKALPAPEEKTISKAKGQPREPQVYTLPPSREEMTKNQVSLTCDVSGFYPSDIAVEWESDGQPENNYKTTPPVLDSDGSFFLYSKLTVDKSRWEQGDVFSCSVMHEALHNHYTQKSLSLSPGK

SEQ ID NO: 1493 - protein, 478 aa, synthetic construct; identical to SEQ ID NO: 2
  source 1..478: note = XENP38576 Chain 2 - ADI-18226_C26[NKG2D]_H0_L0_Fab-2E4A3.189[B7H3]_H1.22_L1_scF v(GKPGS)4-IgG1_pI(-)_Isosteric_A_S239D/I332E/L368D/K370S-Fc (216)_IgG1_C220S/S239D/I332E/S364K/E357Q

SEQ ID NO: 1494 - protein, 214 aa, synthetic construct; identical to SEQ ID NO: 1441
  source 1..214: note = XENP38576 Chain 3 - ADI-18226_C26[NKG2D]_H0_L0_Fab-2E4A3.189[B7H3]_H1.22_L1_scF v(GKPGS)4-IgG1_pI(-)_Isosteric_A_S239D/I332E/L368D/K370S-Fc (216)_IgG1_C220S/S239D/I332E/S364K/E357Q

SEQ ID NO: 1495 - protein, 451 aa, synthetic construct
  source 1..451: note = XENP38588 Chain 1 - 1D2B4[NKG2D]_H1_L1_IgG1_S239D/I332E
EVQLLESGGGLVQPGGSLRLSCAASGFTFSSFGMSWVRQAPGKGLEWVSTISGSGSTTYYADSVKGRFTISRDNSKNTLYLQMNSLRAEDTAVYYCAKGVFSEWHYYFDYWGQGTLVTVSSASTKGPSVFPLAPSSKSTSGGTAALGCLVKDYFPEPVTVSWNSGALTSGVHTFPAVLQSSGLYSLSSVVTVPSSSLGTQTYICNVNHKPSNTKVDKKVEPKSCDKTHTCPPCPAPELLGGPDVFLFPPKPKDTLMISRTPEVTCVVVDVSHEDPEVKFNWYVDGVEVHNAKTKPREEQYNSTYRVVSVLTVLHQDWLNGKEYKCKVSNKALPAPEEKTISKAKGQPREPQVYTLPPSREEMTKNQVSLTCLVKGFYPSDIAVEWESNGQPENNYKTTPPVLDSDGSFFLYSKLTVDKSRWQQGNVFSCSVMHEALHNHYTQKSLSLSPGK

SEQ ID NO: 1496 - protein, 214 aa, synthetic construct; identical to SEQ ID NO: 3
  source 1..214: note = XENP38588 Chain 2 - 1D2B4[NKG2D]_H1_L1_IgG1_S239D/I332E

SEQ ID NO: 1497 - protein, 451 aa, synthetic construct
  source 1..451: note = XENP38589 Chain 1 - 1D7B4[NKG2D]_H1_L1_IgG1_S239D/I332E
EVQLLESGGGLVQPGGSLRLSCAASGFTFSSYAMSWVRQAPGKGLEWVSSISASGGSTYYADSVKGRFTISRDNSKNTLYLQMNSLRAEDTAVYYCAKGIFSIYFFYFDYWGQGTLVTVSSASTKGPSVFPLAPSSKSTSGGTAALGCLVKDYFPEPVTVSWNSGALTSGVHTFPAVLQSSGLYSLSSVVTVPSSSLGTQTYICNVNHKPSNTKVDKKVEPKSCDKTHTCPPCPAPELLGGPDVFLFPPKPKDTLMISRTPEVTCVVVDVSHEDPEVKFNWYVDGVEVHNAKTKPREEQYNSTYRVVSVLTVLHQDWLNGKEYKCKVSNKALPAPEEKTISKAKGQPREPQVYTLPPSREEMTKNQVSLTCLVKGFYPSDIAVEWESNGQPENNYKTTPPVLDSDGSFFLYSKLTVDKSRWQQGNVFSCSVMHEALHNHYTQKSLSLSPGK

SEQ ID NO: 1498 - protein, 214 aa, synthetic construct; identical to SEQ ID NO: 3
  source 1..214: note = XENP38589 Chain 2 - 1D7B4[NKG2D]_H1_L1_IgG1_S239D/I332E

SEQ ID NO: 1499 - protein, 452 aa, synthetic construct
  source 1..452: note = XENP38590 Chain 1 - humON72[NKG2D]_H1_L1_IgG1_S239D/I332E
QVQLVQSGAEVKKPGASVKVSCKASGYTFTNYWMHWVRQAPGQGLEWMGEIDPSDIYTNYAQKFQGRVTMTRDTSTSTVYMELSSLRSEDTAVYYCARGIYDGYYVYGMDYWGQGTTVTVSSASTKGPSVFPLAPSSKSTSGGTAALGCLVKDYFPEPVTVSWNSGALTSGVHTFPAVLQSSGLYSLSSVVTVPSSSLGTQTYICNVNHKPSNTKVDKKVEPKSCDKTHTCPPCPAPELLGGPDVFLFPPKPKDTLMISRTPEVTCVVVDVSHEDPEVKFNWYVDGVEVHNAKTKPREEQYNSTYRVVSVLTVLHQDWLNGKEYKCKVSNKALPAPEEKTISKAKGQPREPQVYTLPPSREEMTKNQVSLTCLVKGFYPSDIAVEWESNGQPENNYKTTPPVLDSDGSFFLYSKLTVDKSRWQQGNVFSCSVMHEALHNHYTQKSLSLSPGK

SEQ ID NO: 1500 - protein, 214 aa, synthetic construct; identical to SEQ ID NO: 13
  source 1..214: note = XENP38590 Chain 2 - humON72[NKG2D]_H1_L1_IgG1_S239D/I332E

SEQ ID NO: 1501 - protein, 450 aa, synthetic construct
  source 1..450: note = XENP38591 Chain 1 - 6E5A7[NKG2D]_H2_L1_IgG1_S239D/I332E
QVQLVQSGAEVKKPGASVKVSCKVSGFSLTIYGVHWVRQAPGQGLEWMGVIWSGGSTDYNAKFQGRVTMTKDNSKRTVYMELSSLRSEDTAVYYCSRKSHDGYYGVMDYWGQGTTVTVSSASTKGPSVFPLAPSSKSTSGGTAALGCLVKDYFPEPVTVSWNSGALTSGVHTFPAVLQSSGLYSLSSVVTVPSSSLGTQTYICNVNHKPSNTKVDKKVEPKSCDKTHTCPPCPAPELLGGPDVFLFPPKPKDTLMISRTPEVTCVVVDVSHEDPEVKFNWYVDGVEVHNAKTKPREEQYNSTYRVVSVLTVLHQDWLNGKEYKCKVSNKALPAPEEKTISKAKGQPREPQVYTLPPSREEMTKNQVSLTCLVKGFYPSDIAVEWESNGQPENNYKTTPPVLDSDGSFFLYSKLTVDKSRWQQGNVFSCSVMHEALHNHYTQKSLSLSPGK

SEQ ID NO: 1502 - protein, 214 aa, synthetic construct; identical to SEQ ID NO: 15
  source 1..214: note = XENP38591 Chain 2 - 6E5A7[NKG2D]_H2_L1_IgG1_S239D/I332E

SEQ ID NO: 1503 - protein, 451 aa, synthetic construct
  source 1..451: note = XENP38592 Chain 1 - ADI-27744_A44[NKG2D]_H0_L0_IgG1_S239D/I332E
EVQLLESGGGLVQPGGSLRLSCAASGFTFSSYAMSWVRQAPGKGLEWVSAISGSGGSTYYADSVKGRFTISRDNSKNTLYLQMNSLRAEDTAVYYCAKDGGYYDSGAGDYWGQGTLVTVSSASTKGPSVFPLAPSSKSTSGGTAALGCLVKDYFPEPVTVSWNSGALTSGVHTFPAVLQSSGLYSLSSVVTVPSSSLGTQTYICNVNHKPSNTKVDKKVEPKSCDKTHTCPPCPAPELLGGPDVFLFPPKPKDTLMISRTPEVTCVVVDVSHEDPEVKFNWYVDGVEVHNAKTKPREEQYNSTYRVVSVLTVLHQDWLNGKEYKCKVSNKALPAPEEKTISKAKGQPREPQVYTLPPSREEMTKNQVSLTCLVKGFYPSDIAVEWESNGQPENNYKTTPPVLDSDGSFFLYSKLTVDKSRWQQGNVFSCSVMHEALHNHYTQKSLSLSPGK

SEQ ID NO: 1504 - protein, 214 aa, synthetic construct; identical to SEQ ID NO: 173
  source 1..214: note = XENP38592 Chain 2 - ADI-27744_A44[NKG2D]_H0_L0_IgG1_S239D/I332E

SEQ ID NO: 1505 - protein, 452 aa, synthetic construct
  source 1..452: note = XENP38593 Chain 1 - ADI-27749_A49[NKG2D]_H0_L0_IgG1_S239D/I332E
EVQLVESGGGLVKPGGSLRLSCAASGFTFSSYSMNWVRQAPGKGLEWVSSISSSSSYIYYADSVKGRFTISRDNAKNSLYLQMNSLRAEDTAVYYCARGAPMGAAAGWFDPWGQGTLVTVSSASTKGPSVFPLAPSSKSTSGGTAALGCLVKDYFPEPVTVSWNSGALTSGVHTFPAVLQSSGLYSLSSVVTVPSSSLGTQTYICNVNHKPSNTKVDKKVEPKSCDKTHTCPPCPAPELLGGPDVFLFPPKPKDTLMISRTPEVTCVVVDVSHEDPEVKFNWYVDGVEVHNAKTKPREEQYNSTYRVVSVLTVLHQDWLNGKEYKCKVSNKALPAPEEKTISKAKGQPREPQVYTLPPSREEMTKNQVSLTCLVKGFYPSDIAVEWESNGQPENNYKTTPPVLDSDGSFFLYSKLTVDKSRWQQGNVFSCSVMHEALHNHYTQKSLSLSPGK

SEQ ID NO: 1506 - protein, 214 aa, synthetic construct; identical to SEQ ID NO: 176
  source 1..214: note = XENP38593 Chain 2 - ADI-27749_A49[NKG2D]_H0_L0_IgG1_S239D/I332E

SEQ ID NO: 1507 - protein, 447 aa, synthetic construct; identical to SEQ ID NO: 1492
  source 1..447: note = XENP38594 Chain 1 - ADI-18226_C26[NKG2D]_H0_L0_Fab-Numax_VHVL_scFv(GKPGS)4-IgG1 _pI(-)_Isosteric_A_S239D/I332E/L368D/K370S-Fc(216)_IgG1_C22 0S/S239D/I332E/S364K/E357Q

SEQ ID NO: 1508 - protein, 478 aa, synthetic construct; identical to SEQ ID NO: 177
  source 1..478: note = XENP38594 Chain 2 - ADI-18226_C26[NKG2D]_H0_L0_Fab-Numax_VHVL_scFv(GKPGS)4-IgG1 _pI(-)_Isosteric_A_S239D/I332E/L368D/K370S-Fc(216)_IgG1_C22 0S/S239D/I332E/S364K/E357Q

SEQ ID NO: 1509 - protein, 214 aa, synthetic construct; identical to SEQ ID NO: 1441
  source 1..214: note = XENP38594 Chain 3 - ADI-18226_C26[NKG2D]_H0_L0_Fab-Numax_VHVL_scFv(GKPGS)4-IgG1 _pI(-)_Isosteric_A_S239D/I332E/L368D/K370S-Fc(216)_IgG1_C22 0S/S239D/I332E/S364K/E357Q

SEQ ID NO: 1510 - protein, 451 aa, synthetic construct; identical to SEQ ID NO: 11
  source 1..451: note = XENP38883 Chain 1 - 1D2B4[NKG2D]_H1L1_Fab-IgG1_S364K/E357Q-IgG1_pI(-)_Isosteric _A_S239D/I332E/L368D/K370S

SEQ ID NO: 1511 - protein, 451 aa, synthetic construct
  source 1..451: note = XENP38883 Chain 2 - 1D2B4[NKG2D]_H1L1_Fab-IgG1_S364K/E357Q-IgG1_pI(-)_Isosteric _A_S239D/I332E/L368D/K370S
EVQLLESGGGLVQPGGSLRLSCAASGFTFSSFGMSWVRQAPGKGLEWVSTISGSGSTTYYADSVKGRFTISRDNSKNTLYLQMNSLRAEDTAVYYCAKGVFSEWHYYFDYWGQGTLVTVSSASTKGPSVFPLAPSSKSTSGGTAALGCLVKDYFPEPVTVSWNSGALTSGVHTFPAVLQSSGLYSLSSVVTVPSSSLGTQTYICNVNHKPSNTKVDKKVEPKSCDKTHTCPPCPAPELLGGPSVFLFPPKPKDTLMISRTPEVTCVVVDVSHEDPEVKFNWYVDGVEVHNAKTKPREEQYNSTYRVVSVLTVLHQDWLNGKEYKCKVSNKALPAPIEKTISKAKGQPREPQVYTLPPSREQMTKNQVKLTCLVKGFYPSDIAVEWESNGQPENNYKTTPPVLDSDGSFFLYSKLTVDKSRWQQGNVFSCSVMHEALHNHYTQKSLSLSPGK

SEQ ID NO: 1512 - protein, 214 aa, synthetic construct; identical to SEQ ID NO: 3
  source 1..214: note = XENP38883 Chain 3 - 1D2B4[NKG2D]_H1L1_Fab-IgG1_S364K/E357Q-IgG1_pI(-)_Isosteric _A_S239D/I332E/L368D/K370S

SEQ ID NO: 1513 - protein, 451 aa, synthetic construct; identical to SEQ ID NO: 1
  source 1..451: note = XENP38884 Chain 1 - 1D7B4[NKG2D]_H1L1_Fab-IgG1_S364K/E357Q-IgG1_pI(-)_Isosteric _A_S239D/I332E/L368D/K370S

SEQ ID NO: 1514 - protein, 451 aa, synthetic construct
  source 1..451: note = XENP38884 Chain 2 - 1D7B4[NKG2D]_H1L1_Fab-IgG1_S364K/E357Q-IgG1_pI(-)_Isosteric _A_S239D/I332E/L368D/K370S
EVQLLESGGGLVQPGGSLRLSCAASGFTFSSYAMSWVRQAPGKGLEWVSSISASGGSTYYADSVKGRFTISRDNSKNTLYLQMNSLRAEDTAVYYCAKGIFSIYFFYFDYWGQGTLVTVSSASTKGPSVFPLAPSSKSTSGGTAALGCLVKDYFPEPVTVSWNSGALTSGVHTFPAVLQSSGLYSLSSVVTVPSSSLGTQTYICNVNHKPSNTKVDKKVEPKSCDKTHTCPPCPAPELLGGPSVFLFPPKPKDTLMISRTPEVTCVVVDVSHEDPEVKFNWYVDGVEVHNAKTKPREEQYNSTYRVVSVLTVLHQDWLNGKEYKCKVSNKALPAPIEKTISKAKGQPREPQVYTLPPSREQMTKNQVKLTCLVKGFYPSDIAVEWESNGQPENNYKTTPPVLDSDGSFFLYSKLTVDKSRWQQGNVFSCSVMHEALHNHYTQKSLSLSPGK

SEQ ID NO: 1515 - protein, 214 aa, synthetic construct; identical to SEQ ID NO: 3
  source 1..214: note = XENP38884 Chain 3 - 1D7B4[NKG2D]_H1L1_Fab-IgG1_S364K/E357Q-IgG1_pI(-)_Isosteric _A_S239D/I332E/L368D/K370S

SEQ ID NO: 1516 - protein, 452 aa, synthetic construct; identical to SEQ ID NO: 12
  source 1..452: note = XENP38885 Chain 1 - humON72[NKG2D]_H1L1_Fab-IgG1_S364K/E357Q-IgG1_pI(-)_Isoster ic_A_S239D/I332E/L368D/K370S

SEQ ID NO: 1517 - protein, 452 aa, synthetic construct
  source 1..452: note = XENP38885 Chain 2 - humON72[NKG2D]_H1L1_Fab-IgG1_S364K/E357Q-IgG1_pI(-)_Isoster ic_A_S239D/I332E/L368D/K370S
QVQLVQSGAEVKKPGASVKVSCKASGYTFTNYWMHWVRQAPGQGLEWMGEIDPSDIYTNYAQKFQGRVTMTRDTSTSTVYMELSSLRSEDTAVYYCARGIYDGYYVYGMDYWGQGTTVTVSSASTKGPSVFPLAPSSKSTSGGTAALGCLVKDYFPEPVTVSWNSGALTSGVHTFPAVLQSSGLYSLSSVVTVPSSSLGTQTYICNVNHKPSNTKVDKKVEPKSCDKTHTCPPCPAPELLGGPSVFLFPPKPKDTLMISRTPEVTCVVVDVSHEDPEVKFNWYVDGVEVHNAKTKPREEQYNSTYRVVSVLTVLHQDWLNGKEYKCKVSNKALPAPIEKTISKAKGQPREPQVYTLPPSREQMTKNQVKLTCLVKGFYPSDIAVEWESNGQPENNYKTTPPVLDSDGSFFLYSKLTVDKSRWQQGNVFSCSVMHEALHNHYTQKSLSLSPGK

SEQ ID NO: 1518 - protein, 214 aa, synthetic construct; identical to SEQ ID NO: 13
  source 1..214: note = XENP38885 Chain 3 - humON72[NKG2D]_H1L1_Fab-IgG1_S364K/E357Q-IgG1_pI(-)_Isoster ic_A_S239D/I332E/L368D/K370S

SEQ ID NO: 1519 - protein, 450 aa, synthetic construct; identical to SEQ ID NO: 14
  source 1..450: note = XENP38886 Chain 1 - 6E5A7[NKG2D]_H2L1_Fab-IgG1_S364K/E357Q-IgG1_pI(-)_Isosteric _A_S239D/I332E/L368D/K370S

SEQ ID NO: 1520 - protein, 450 aa, synthetic construct
  source 1..450: note = XENP38886 Chain 2 - 6E5A7[NKG2D]_H2L1_Fab-IgG1_S364K/E357Q-IgG1_pI(-)_Isosteric _A_S239D/I332E/L368D/K370S
QVQLVQSGAEVKKPGASVKVSCKVSGFSLTIYGVHWVRQAPGQGLEWMGVIWSGGSTDYNAKFQGRVTMTKDNSKRTVYMELSSLRSEDTAVYYCSRKSHDGYYGVMDYWGQGTTVTVSSASTKGPSVFPLAPSSKSTSGGTAALGCLVKDYFPEPVTVSWNSGALTSGVHTFPAVLQSSGLYSLSSVVTVPSSSLGTQTYICNVNHKPSNTKVDKKVEPKSCDKTHTCPPCPAPELLGGPSVFLFPPKPKDTLMISRTPEVTCVVVDVSHEDPEVKFNWYVDGVEVHNAKTKPREEQYNSTYRVVSVLTVLHQDWLNGKEYKCKVSNKALPAPIEKTISKAKGQPREPQVYTLPPSREQMTKNQVKLTCLVKGFYPSDIAVEWESNGQPENNYKTTPPVLDSDGSFFLYSKLTVDKSRWQQGNVFSCSVMHEALHNHYTQKSLSLSPGK

SEQ ID NO: 1521 - protein, 214 aa, synthetic construct; identical to SEQ ID NO: 15
  source 1..214: note = XENP38886 Chain 3 - 6E5A7[NKG2D]_H2L1_Fab-IgG1_S364K/E357Q-IgG1_pI(-)_Isosteric _A_S239D/I332E/L368D/K370S

SEQ ID NO: 1522 - protein, 451 aa, synthetic construct; identical to SEQ ID NO: 172
  source 1..451: note = XENP38887 Chain 1 - ADI-27744_A44[NKG2D]_H0L0_Fab-IgG1_S364K/E357Q-IgG1_pI(-)_I sosteric_A_S239D/I332E/L368D/K370S

SEQ ID NO: 1523 - protein, 451 aa, synthetic construct
  source 1..451: note = XENP38887 Chain 2 - ADI-27744_A44[NKG2D]_H0L0_Fab-IgG1_S364K/E357Q-IgG1_pI(-)_I sosteric_A_S239D/I332E/L368D/K370S
EVQLLESGGGLVQPGGSLRLSCAASGFTFSSYAMSWVRQAPGKGLEWVSAISGSGGSTYYADSVKGRFTISRDNSKNTLYLQMNSLRAEDTAVYYCAKDGGYYDSGAGDYWGQGTLVTVSSASTKGPSVFPLAPSSKSTSGGTAALGCLVKDYFPEPVTVSWNSGALTSGVHTFPAVLQSSGLYSLSSVVTVPSSSLGTQTYICNVNHKPSNTKVDKKVEPKSCDKTHTCPPCPAPELLGGPSVFLFPPKPKDTLMISRTPEVTCVVVDVSHEDPEVKFNWYVDGVEVHNAKTKPREEQYNSTYRVVSVLTVLHQDWLNGKEYKCKVSNKALPAPIEKTISKAKGQPREPQVYTLPPSREQMTKNQVKLTCLVKGFYPSDIAVEWESNGQPENNYKTTPPVLDSDGSFFLYSKLTVDKSRWQQGNVFSCSVMHEALHNHYTQKSLSLSPGK

SEQ ID NO: 1524 - protein, 214 aa, synthetic construct; identical to SEQ ID NO: 173
  source 1..214: note = XENP38887 Chain 3 - ADI-27744_A44[NKG2D]_H0L0_Fab-IgG1_S364K/E357Q-IgG1_pI(-)_I sosteric_A_S239D/I332E/L368D/K370S

SEQ ID NO: 1525 - protein, 452 aa, synthetic construct; identical to SEQ ID NO: 175
  source 1..452: note = XENP38888 Chain 1 - ADI-27749_A49[NKG2D]_H0L0_Fab-IgG1_S364K/E357Q-IgG1_pI(-)_I sosteric_A_S239D/I332E/L368D/K370S

SEQ ID NO: 1526 - protein, 452 aa, synthetic construct
  source 1..452: note = XENP38888 Chain 2 - ADI-27749_A49[NKG2D]_H0L0_Fab-IgG1_S364K/E357Q-IgG1_pI(-)_I sosteric_A_S239D/I332E/L368D/K370S
EVQLVESGGGLVKPGGSLRLSCAASGFTFSSYSMNWVRQAPGKGLEWVSSISSSSSYIYYADSVKGRFTISRDNAKNSLYLQMNSLRAEDTAVYYCARGAPMGAAAGWFDPWGQGTLVTVSSASTKGPSVFPLAPSSKSTSGGTAALGCLVKDYFPEPVTVSWNSGALTSGVHTFPAVLQSSGLYSLSSVVTVPSSSLGTQTYICNVNHKPSNTKVDKKVEPKSCDKTHTCPPCPAPELLGGPSVFLFPPKPKDTLMISRTPEVTCVVVDVSHEDPEVKFNWYVDGVEVHNAKTKPREEQYNSTYRVVSVLTVLHQDWLNGKEYKCKVSNKALPAPIEKTISKAKGQPREPQVYTLPPSREQMTKNQVKLTCLVKGFYPSDIAVEWESNGQPENNYKTTPPVLDSDGSFFLYSKLTVDKSRWQQGNVFSCSVMHEALHNHYTQKSLSLSPGK

SEQ ID NO: 1527 - protein, 214 aa, synthetic construct; identical to SEQ ID NO: 176
  source 1..214: note = XENP38888 Chain 3 - ADI-27749_A49[NKG2D]_H0L0_Fab-IgG1_S364K/E357Q-IgG1_pI(-)_I sosteric_A_S239D/I332E/L368D/K370S

SEQ ID NO: 1528 - protein, 447 aa, synthetic construct; identical to SEQ ID NO: 1492
  source 1..447: note = XENP38889 Chain 1 - ADI-18226_C26[NKG2D]_H0L0_Fab-IgG1_S364K/E357Q-IgG1_pI(-)_I sosteric_A_S239D/I332E/L368D/K370S

SEQ ID NO: 1529 - protein, 447 aa, synthetic construct
  source 1..447: note = XENP38889 Chain 2 - ADI-18226_C26[NKG2D]_H0L0_Fab-IgG1_S364K/E357Q-IgG1_pI(-)_I sosteric_A_S239D/I332E/L368D/K370S
QVQLQQWGAGLLKPSETLSLTCAVYGGSFSGYYWSWIRQPPGKGLEWIGEIDHSGSTNYNPSLKSRVTISVDTSKNQFSLKLSSVTAADTAVYYCARARGPWSFDPWGQGTLVTVSSASTKGPSVFPLAPSSKSTSGGTAALGCLVKDYFPEPVTVSWNSGALTSGVHTFPAVLQSSGLYSLSSVVTVPSSSLGTQTYICNVNHKPSNTKVDKKVEPKSCDKTHTCPPCPAPELLGGPSVFLFPPKPKDTLMISRTPEVTCVVVDVSHEDPEVKFNWYVDGVEVHNAKTKPREEQYNSTYRVVSVLTVLHQDWLNGKEYKCKVSNKALPAPIEKTISKAKGQPREPQVYTLPPSREQMTKNQVKLTCLVKGFYPSDIAVEWESNGQPENNYKTTPPVLDSDGSFFLYSKLTVDKSRWQQGNVFSCSVMHEALHNHYTQKSLSLSPGK

SEQ ID NO: 1530 - protein, 214 aa, synthetic construct; identical to SEQ ID NO: 1441
  source 1..214: note = XENP38889 Chain 3 - ADI-18226_C26[NKG2D]_H0L0_Fab-IgG1_S364K/E357Q-IgG1_pI(-)_I sosteric_A_S239D/I332E/L368D/K370S

SEQ ID NO: 1531 - protein, 450 aa, synthetic construct; identical to SEQ ID NO: 1356
  source 1..450: note = XENP38890 Chain 1 - 1D2B4[NKG2D]_H1L1_Fab-6A1[B7H3]_H1_L1_scFv(GKPGS)4-IgG1_pI( -)_Isosteric_A_PVA_/S267K/L368D/K370S-Fc(216)_IgG1_C220S/PV A_/S267K/S364K/E357Q

SEQ ID NO: 1532 - protein, 478 aa, synthetic construct
  source 1..478: note = XENP38890 Chain 2 - 1D2B4[NKG2D]_H1L1_Fab-6A1[B7H3]_H1_L1_scFv(GKPGS)4-IgG1_pI( -)_Isosteric_A_PVA_/S267K/L368D/K370S-Fc(216)_IgG1_C220S/PV A_/S267K/S364K/E357Q
EVQLLESGGGLVQPGGSLRLSCAASGFTFSNYYMAWVRQAPGKGLEWVSSISTGGGSTYYRDSVKGRFTISRDNSKSTLYLQMNSLRAEDTAVYYCTTDLSAIAATPFAYWGQGTLVTVSSGKPGSGKPGSGKPGSGKPGSDIQMTQSPSSLSASVGDRVTITCRASQNIYTSLAWYQQKPGKAPKLLIYNAHSLQTGIPSRFSGSGSGADFTLTISSLQPEDFATYFCQQYYSGLTFGSGTKLEIKEPKSSDKTHTCPPCPAPPVAGPSVFLFPPKPKDTLMISRTPEVTCVVVDVKHEDPEVKFNWYVDGVEVHNAKTKPREEQYNSTYRVVSVLTVLHQDWLNGKEYKCKVSNKALPAPIEKTISKAKGQPREPQVYTLPPSREQMTKNQVKLTCLVKGFYPSDIAVEWESNGQPENNYKTTPPVLDSDGSFFLYSKLTVDKSRWQQGNVFSCSVMHEALHNHYTQKSLSLSPGK

SEQ ID NO: 1533 - protein, 214 aa, synthetic construct; identical to SEQ ID NO: 3
  source 1..214: note = XENP38890 Chain 3 - 1D2B4[NKG2D]_H1L1_Fab-6A1[B7H3]_H1_L1_scFv(GKPGS)4-IgG1_pI( -)_Isosteric_A_PVA_/S267K/L368D/K370S-Fc(216)_IgG1_C220S/PV A_/S267K/S364K/E357Q

SEQ ID NO: 1534 - protein, 450 aa, synthetic construct; identical to SEQ ID NO: 7
  source 1..450: note = XENP38891 Chain 1 - 1D7B4[NKG2D]_H1L1_Fab-6A1[B7H3]_H1_L1_scFv(GKPGS)4-IgG1_pI( -)_Isosteric_A_PVA_/S267K/L368D/K370S-Fc(216)_IgG1_C220S/PV A_/S267K/S364K/E357Q

SEQ ID NO: 1535 - protein, 478 aa, synthetic construct; identical to SEQ ID NO: 1532
  source 1..478: note = XENP38891 Chain 2 - 1D7B4[NKG2D]_H1L1_Fab-6A1[B7H3]_H1_L1_scFv(GKPGS)4-IgG1_pI( -)_Isosteric_A_PVA_/S267K/L368D/K370S-Fc(216)_IgG1_C220S/PV A_/S267K/S364K/E357Q

SEQ ID NO: 1536 - protein, 214 aa, synthetic construct; identical to SEQ ID NO: 3
  source 1..214: note = XENP38891 Chain 3 - 1D7B4[NKG2D]_H1L1_Fab-6A1[B7H3]_H1_L1_scFv(GKPGS)4-IgG1_pI( -)_Isosteric_A_PVA_/S267K/L368D/K370S-Fc(216)_IgG1_C220S/PV A_/S267K/S364K/E357Q

SEQ ID NO: 1537 - protein, 451 aa, synthetic construct; identical to SEQ ID NO: 1451
  source 1..451: note = XENP38892 Chain 1 - humON72[NKG2D]_H1L1_Fab-6A1[B7H3]_H1_L1_scFv(GKPGS)4-IgG1_p I(-)_Isosteric_A_PVA_/S267K/L368D/K370S-Fc(216)_IgG1_C220S/ PVA_/S267K/S364K/E357Q

SEQ ID NO: 1538 - protein, 478 aa, synthetic construct; identical to SEQ ID NO: 1532
  source 1..478: note = XENP38892 Chain 2 - humON72[NKG2D]_H1L1_Fab-6A1[B7H3]_H1_L1_scFv(GKPGS)4-IgG1_p I(-)_Isosteric_A_PVA_/S267K/L368D/K370S-Fc(216)_IgG1_C220S/ PVA_/S267K/S364K/E357Q

SEQ ID NO: 1539 - protein, 214 aa, synthetic construct; identical to SEQ ID NO: 13
  source 1..214: note = XENP38892 Chain 3 - humON72[NKG2D]_H1L1_Fab-6A1[B7H3]_H1_L1_scFv(GKPGS)4-IgG1_p I(-)_Isosteric_A_PVA_/S267K/L368D/K370S-Fc(216)_IgG1_C220S/ PVA_/S267K/S364K/E357Q

SEQ ID NO: 1540 - protein, 449 aa, synthetic construct; identical to SEQ ID NO: 1454
  source 1..449: note = XENP38893 Chain 1 - 6E5A7[NKG2D]_H2L1_Fab-6A1[B7H3]_H1_L1_scFv(GKPGS)4-IgG1_pI( -)_Isosteric_A_PVA_/S267K/L368D/K370S-Fc(216)_IgG1_C220S/PV A_/S267K/S364K/E357Q

SEQ ID NO: 1541 - protein, 478 aa, synthetic construct; identical to SEQ ID NO: 1532
  source 1..478: note = XENP38893 Chain 2 - 6E5A7[NKG2D]_H2L1_Fab-6A1[B7H3]_H1_L1_scFv(GKPGS)4-IgG1_pI( -)_Isosteric_A_PVA_/S267K/L368D/K370S-Fc(216)_IgG1_C220S/PV A_/S267K/S364K/E357Q

SEQ ID NO: 1542 - protein, 214 aa, synthetic construct; identical to SEQ ID NO: 15
  source 1..214: note = XENP38893 Chain 3 - 6E5A7[NKG2D]_H2L1_Fab-6A1[B7H3]_H1_L1_scFv(GKPGS)4-IgG1_pI( -)_Isosteric_A_PVA_/S267K/L368D/K370S-Fc(216)_IgG1_C220S/PV A_/S267K/S364K/E357Q

SEQ ID NO: 1543 - protein, 450 aa, synthetic construct; identical to SEQ ID NO: 1457
  source 1..450: note = XENP38894 Chain 1 - ADI-27744_A44[NKG2D]_H0L0_Fab-6A1[B7H3]_H1_L1_scFv(GKPGS)4- IgG1_pI(-)_Isosteric_A_PVA_/S267K/L368D/K370S-Fc(216)_IgG1_ C220S/PVA_/S267K/S364K/E357Q

SEQ ID NO: 1544 - protein, 478 aa, synthetic construct; identical to SEQ ID NO: 1532
  source 1..478: note = XENP38894 Chain 2 - ADI-27744_A44[NKG2D]_H0L0_Fab-6A1[B7H3]_H1_L1_scFv(GKPGS)4- IgG1_pI(-)_Isosteric_A_PVA_/S267K/L368D/K370S-Fc(216)_IgG1_ C220S/PVA_/S267K/S364K/E357Q

SEQ ID NO: 1545 - protein, 214 aa, synthetic construct; identical to SEQ ID NO: 173
  source 1..214: note = XENP38894 Chain 3 - ADI-27744_A44[NKG2D]_H0L0_Fab-6A1[B7H3]_H1_L1_scFv(GKPGS)4- IgG1_pI(-)_Isosteric_A_PVA_/S267K/L368D/K370S-Fc(216)_IgG1_ C220S/PVA_/S267K/S364K/E357Q

SEQ ID NO: 1546 - protein, 451 aa, synthetic construct; identical to SEQ ID NO: 1460
  source 1..451: note = XENP38895 Chain 1 - ADI-27749_A49[NKG2D]_H0L0_Fab-6A1[B7H3]_H1_L1_scFv(GKPGS)4- IgG1_pI(-)_Isosteric_A_PVA_/S267K/L368D/K370S-Fc(216)_IgG1_ C220S/PVA_/S267K/S364K/E357Q

SEQ ID NO: 1547 - protein, 478 aa, synthetic construct; identical to SEQ ID NO: 1532
  source 1..478: note = XENP38895 Chain 2 - ADI-27749_A49[NKG2D]_H0L0_Fab-6A1[B7H3]_H1_L1_scFv(GKPGS)4- IgG1_pI(-)_Isosteric_A_PVA_/S267K/L368D/K370S-Fc(216)_IgG1_ C220S/PVA_/S267K/S364K/E357Q

SEQ ID NO: 1548 - protein, 214 aa, synthetic construct; identical to SEQ ID NO: 176
  source 1..214: note = XENP38895 Chain 3 - ADI-27749_A49[NKG2D]_H0L0_Fab-6A1[B7H3]_H1_L1_scFv(GKPGS)4- IgG1_pI(-)_Isosteric_A_PVA_/S267K/L368D/K370S-Fc(216)_IgG1_ C220S/PVA_/S267K/S364K/E357Q

SEQ ID NO: 1549 - protein, 446 aa, synthetic construct; identical to SEQ ID NO: 1463
  source 1..446: note = XENP38896 Chain 1 - ADI-18226_C26[NKG2D]_H0L0_Fab-6A1[B7H3]_H1_L1_scFv(GKPGS)4- IgG1_pI(-)_Isosteric_A_PVA_/S267K/L368D/K370S-Fc(216)_IgG1_ C220S/PVA_/S267K/S364K/E357Q

SEQ ID NO: 1550 - protein, 478 aa, synthetic construct; identical to SEQ ID NO: 1532
  source 1..478: note = XENP38896 Chain 2 - ADI-18226_C26[NKG2D]_H0L0_Fab-6A1[B7H3]_H1_L1_scFv(GKPGS)4- IgG1_pI(-)_Isosteric_A_PVA_/S267K/L368D/K370S-Fc(216)_IgG1_ C220S/PVA_/S267K/S364K/E357Q

SEQ ID NO: 1551 - protein, 214 aa, synthetic construct; identical to SEQ ID NO: 1441
  source 1..214: note = XENP38896 Chain 3 - ADI-18226_C26[NKG2D]_H0L0_Fab-6A1[B7H3]_H1_L1_scFv(GKPGS)4- IgG1_pI(-)_Isosteric_A_PVA_/S267K/L368D/K370S-Fc(216)_IgG1_ C220S/PVA_/S267K/S364K/E357Q

SEQ ID NO: 1552 - protein, 451 aa, synthetic construct; identical to SEQ ID NO: 1466
  source 1..451: note = XENP38897 Chain 1 - 1D2B4[NKG2D]_H1L1_Fab-6A1[B7H3]_H1_L1_scFv(GKPGS)4-IgG1_pI( -)_Isosteric_A_L368D/K370S-Fc(216)_IgG1_C220S/S364K/E357Q

SEQ ID NO: 1553 - protein, 479 aa, synthetic construct
  source 1..479: note = XENP38897 Chain 2 - 1D2B4[NKG2D]_H1L1_Fab-6A1[B7H3]_H1_L1_scFv(GKPGS)4-IgG1_pI( -)_Isosteric_A_L368D/K370S-Fc(216)_IgG1_C220S/S364K/E357Q
EVQLLESGGGLVQPGGSLRLSCAASGFTFSNYYMAWVRQAPGKGLEWVSSISTGGGSTYYRDSVKGRFTISRDNSKSTLYLQMNSLRAEDTAVYYCTTDLSAIAATPFAYWGQGTLVTVSSGKPGSGKPGSGKPGSGKPGSDIQMTQSPSSLSASVGDRVTITCRASQNIYTSLAWYQQKPGKAPKLLIYNAHSLQTGIPSRFSGSGSGADFTLTISSLQPEDFATYFCQQYYSGLTFGSGTKLEIKEPKSSDKTHTCPPCPAPELLGGPSVFLFPPKPKDTLMISRTPEVTCVVVDVSHEDPEVKFNWYVDGVEVHNAKTKPREEQYNSTYRVVSVLTVLHQDWLNGKEYKCKVSNKALPAPIEKTISKAKGQPREPQVYTLPPSREQMTKNQVKLTCLVKGFYPSDIAVEWESNGQPENNYKTTPPVLDSDGSFFLYSKLTVDKSRWQQGNVFSCSVMHEALHNHYTQKSLSLSPGK

SEQ ID NO: 1554 - protein, 214 aa, synthetic construct; identical to SEQ ID NO: 3
  source 1..214: note = XENP38897 Chain 3 - 1D2B4[NKG2D]_H1L1_Fab-6A1[B7H3]_H1_L1_scFv(GKPGS)4-IgG1_pI( -)_Isosteric_A_L368D/K370S-Fc(216)_IgG1_C220S/S364K/E357Q

SEQ ID NO: 1555 - protein, 451 aa, synthetic construct; identical to SEQ ID NO: 9
  source 1..451: note = XENP38898 Chain 1 - 1D7B4[NKG2D]_H1L1_Fab-6A1[B7H3]_H1_L1_scFv(GKPGS)4-IgG1_pI( -)_Isosteric_A_L368D/K370S-Fc(216)_IgG1_C220S/S364K/E357Q

SEQ ID NO: 1556 - protein, 479 aa, synthetic construct; identical to SEQ ID NO: 1553
  source 1..479: note = XENP38898 Chain 2 - 1D7B4[NKG2D]_H1L1_Fab-6A1[B7H3]_H1_L1_scFv(GKPGS)4-IgG1_pI( -)_Isosteric_A_L368D/K370S-Fc(216)_IgG1_C220S/S364K/E357Q

SEQ ID NO: 1557 - protein, 214 aa, synthetic construct; identical to SEQ ID NO: 3
  source 1..214: note = XENP38898 Chain 3 - 1D7B4[NKG2D]_H1L1_Fab-6A1[B7H3]_H1_L1_scFv(GKPGS)4-IgG1_pI( -)_Isosteric_A_L368D/K370S-Fc(216)_IgG1_C220S/S364K/E357Q

SEQ ID NO: 1558 - protein, 452 aa, synthetic construct; identical to SEQ ID NO: 1469
  source 1..452: note = XENP38899 Chain 1 - humON72[NKG2D]_H1L1_Fab-6A1[B7H3]_H1_L1_scFv(GKPGS)4-IgG1_p I(-)_Isosteric_A_L368D/K370S-Fc(216)_IgG1_C220S/S364K/E357Q

SEQ ID NO: 1559 - protein, 479 aa, synthetic construct; identical to SEQ ID NO: 1553
  source 1..479: note = XENP38899 Chain 2 - humON72[NKG2D]_H1L1_Fab-6A1[B7H3]_H1_L1_scFv(GKPGS)4-IgG1_p I(-)_Isosteric_A_L368D/K370S-Fc(216)_IgG1_C220S/S364K/E357Q

SEQ ID NO: 1560 - protein, 214 aa, synthetic construct; identical to SEQ ID NO: 13
  source 1..214: note = XENP38899 Chain 3 - humON72[NKG2D]_H1L1_Fab-6A1[B7H3]_H1_L1_scFv(GKPGS)4-IgG1_p I(-)_Isosteric_A_L368D/K370S-Fc(216)_IgG1_C220S/S364K/E357Q

SEQ ID NO: 1561 - protein, 450 aa, synthetic construct; identical to SEQ ID NO: 1472
  source 1..450: note = XENP38900 Chain 1 - 6E5A7[NKG2D]_H2L1_Fab-6A1[B7H3]_H1_L1_scFv(GKPGS)4-IgG1_pI( -)_Isosteric_A_L368D/K370S-Fc(216)_IgG1_C220S/S364K/E357Q

SEQ ID NO: 1562 - protein, 479 aa, synthetic construct; identical to SEQ ID NO: 1553
  source 1..479: note = XENP38900 Chain 2 - 6E5A7[NKG2D]_H2L1_Fab-6A1[B7H3]_H1_L1_scFv(GKPGS)4-IgG1_pI( -)_Isosteric_A_L368D/K370S-Fc(216)_IgG1_C220S/S364K/E357Q

SEQ ID NO: 1563 - protein, 214 aa, synthetic construct; identical to SEQ ID NO: 15
  source 1..214: note = XENP38900 Chain 3 - 6E5A7[NKG2D]_H2L1_Fab-6A1[B7H3]_H1_L1_scFv(GKPGS)4-IgG1_pI( -)_Isosteric_A_L368D/K370S-Fc(216)_IgG1_C220S/S364K/E357Q

SEQ ID NO: 1564 - protein, 451 aa, synthetic construct; identical to SEQ ID NO: 1475
  source 1..451: note = XENP38901 Chain 1 - ADI-27744_A44[NKG2D]_H0L0_Fab-6A1[B7H3]_H1_L1_scFv(GKPGS)4- IgG1_pI(-)_Isosteric_A_L368D/K370S-Fc(216)_IgG1_C220S/S364K /E357Q

SEQ ID NO: 1565 - protein, 479 aa, synthetic construct; identical to SEQ ID NO: 1553
  source 1..479: note = XENP38901 Chain 2 - ADI-27744_A44[NKG2D]_H0L0_Fab-6A1[B7H3]_H1_L1_scFv(GKPGS)4- IgG1_pI(-)_Isosteric_A_L368D/K370S-Fc(216)_IgG1_C220S/S364K /E357Q

SEQ ID NO: 1566 - protein, 214 aa, synthetic construct; identical to SEQ ID NO: 173
  source 1..214: note = XENP38901 Chain 3 - ADI-27744_A44[NKG2D]_H0L0_Fab-6A1[B7H3]_H1_L1_scFv(GKPGS)4- IgG1_pI(-)_Isosteric_A_L368D/K370S-Fc(216)_IgG1_C220S/S364K /E357Q

SEQ ID NO: 1567 - protein, 452 aa, synthetic construct; identical to SEQ ID NO: 1478
  source 1..452: note = XENP38902 Chain 1 - ADI-27749_A49[NKG2D]_H0L0_Fab-6A1[B7H3]_H1_L1_scFv(GKPGS)4- IgG1_pI(-)_Isosteric_A_L368D/K370S-Fc(216)_IgG1_C220S/S364K /E357Q

SEQ ID NO: 1568 - protein, 479 aa, synthetic construct; identical to SEQ ID NO: 1553
  source 1..479: note = XENP38902 Chain 2 - ADI-27749_A49[NKG2D]_H0L0_Fab-6A1[B7H3]_H1_L1_scFv(GKPGS)4- IgG1_pI(-)_Isosteric_A_L368D/K370S-Fc(216)_IgG1_C220S/S364K /E357Q

SEQ ID NO: 1569 - protein, 214 aa, synthetic construct; identical to SEQ ID NO: 176
  source 1..214: note = XENP38902 Chain 3 - ADI-27749_A49[NKG2D]_H0L0_Fab-6A1[B7H3]_H1_L1_scFv(GKPGS)4- IgG1_pI(-)_Isosteric_A_L368D/K370S-Fc(216)_IgG1_C220S/S364K /E357Q

SEQ ID NO: 1570 - protein, 447 aa, synthetic construct; identical to SEQ ID NO: 1481
  source 1..447: note = XENP38903 Chain 1 - ADI-18226_C26[NKG2D]_H0L0_Fab-6A1[B7H3]_H1_L1_scFv(GKPGS)4- IgG1_pI(-)_Isosteric_A_L368D/K370S-Fc(216)_IgG1_C220S/S364K /E357Q

SEQ ID NO: 1571 - protein, 479 aa, synthetic construct; identical to SEQ ID NO: 1553
  source 1..479: note = XENP38903 Chain 2 - ADI-18226_C26[NKG2D]_H0L0_Fab-6A1[B7H3]_H1_L1_scFv(GKPGS)4- IgG1_pI(-)_Isosteric_A_L368D/K370S-Fc(216)_IgG1_C220S/S364K /E357Q

SEQ ID NO: 1572 - protein, 214 aa, synthetic construct; identical to SEQ ID NO: 1441
  source 1..214: note = XENP38903 Chain 3 - ADI-18226_C26[NKG2D]_H0L0_Fab-6A1[B7H3]_H1_L1_scFv(GKPGS)4- IgG1_pI(-)_Isosteric_A_L368D/K370S-Fc(216)_IgG1_C220S/S364K /E357Q

SEQ ID NO: 1573 - protein, 451 aa, synthetic construct; identical to SEQ ID NO: 11
  source 1..451: note = XENP38904 Chain 1 - 1D2B4[NKG2D]_H1L1_Fab-6A1[B7H3]_H1_L1_scFv(GKPGS)4-IgG1_pI( -)_Isosteric_A_S239D/I332E/L368D/K370S-Fc(216)_IgG1_C220S/S 364K/E357Q

SEQ ID NO: 1574 - protein, 479 aa, synthetic construct; identical to SEQ ID NO: 1553
  source 1..479: note = XENP38904 Chain 2 - 1D2B4[NKG2D]_H1L1_Fab-6A1[B7H3]_H1_L1_scFv(GKPGS)4-IgG1_pI( -)_Isosteric_A_S239D/I332E/L368D/K370S-Fc(216)_IgG1_C220S/S 364K/E357Q

SEQ ID NO: 1575 - protein, 214 aa, synthetic construct; identical to SEQ ID NO: 3
  source 1..214: note = XENP38904 Chain 3 - 1D2B4[NKG2D]_H1L1_Fab-6A1[B7H3]_H1_L1_scFv(GKPGS)4-IgG1_pI( -)_Isosteric_A_S239D/I332E/L368D/K370S-Fc(216)_IgG1_C220S/S 364K/E357Q

SEQ ID NO: 1576 - protein, 451 aa, synthetic construct; identical to SEQ ID NO: 1
  source 1..451: note = XENP38905 Chain 1 - 1D7B4[NKG2D]_H1L1_Fab-6A1[B7H3]_H1_L1_scFv(GKPGS)4-IgG1_pI( -)_Isosteric_A_S239D/I332E/L368D/K370S-Fc(216)_IgG1_C220S/S 364K/E357Q

SEQ ID NO: 1577 - protein, 479 aa, synthetic construct; identical to SEQ ID NO: 1553
  source 1..479: note = XENP38905 Chain 2 - 1D7B4[NKG2D]_H1L1_Fab-6A1[B7H3]_H1_L1_scFv(GKPGS)4-IgG1_pI( -)_Isosteric_A_S239D/I332E/L368D/K370S-Fc(216)_IgG1_C220S/S 364K/E357Q

SEQ ID NO: 1578 - protein, 214 aa, synthetic construct; identical to SEQ ID NO: 3
  source 1..214: note = XENP38905 Chain 3 - 1D7B4[NKG2D]_H1L1_Fab-6A1[B7H3]_H1_L1_scFv(GKPGS)4-IgG1_pI( -)_Isosteric_A_S239D/I332E/L368D/K370S-Fc(216)_IgG1_C220S/S 364K/E357Q

SEQ ID NO: 1579 - protein, 452 aa, synthetic construct; identical to SEQ ID NO: 12
  source 1..452: note = XENP38906 Chain 1 - humON72[NKG2D]_H1L1_Fab-6A1[B7H3]_H1_L1_scFv(GKPGS)4-IgG1_p I(-)_Isosteric_A_S239D/I332E/L368D/K370S-Fc(216)_IgG1_C220S /S364K/E357Q

SEQ ID NO: 1580 - protein, 479 aa, synthetic construct; identical to SEQ ID NO: 1553
  source 1..479: note = XENP38906 Chain 2 - humON72[NKG2D]_H1L1_Fab-6A1[B7H3]_H1_L1_scFv(GKPGS)4-IgG1_p I(-)_Isosteric_A_S239D/I332E/L368D/K370S-Fc(216)_IgG1_C220S /S364K/E357Q

SEQ ID NO: 1581 - protein, 214 aa, synthetic construct; identical to SEQ ID NO: 13
  source 1..214: note = XENP38906 Chain 3 - humON72[NKG2D]_H1L1_Fab-6A1[B7H3]_H1_L1_scFv(GKPGS)4-IgG1_p I(-)_Isosteric_A_S239D/I332E/L368D/K370S-Fc(216)_IgG1_C220S /S364K/E357Q

SEQ ID NO: 1582 - protein, 450 aa, synthetic construct; identical to SEQ ID NO: 14
  source 1..450: note = XENP38907 Chain 1 - 6E5A7[NKG2D]_H2L1_Fab-6A1[B7H3]_H1_L1_scFv(GKPGS)4-IgG1_pI( -)_Isosteric_A_S239D/I332E/L368D/K370S-Fc(216)_IgG1_C220S/S 364K/E357Q

SEQ ID NO: 1583 - protein, 479 aa, synthetic construct; identical to SEQ ID NO: 1553
  source 1..479: note = XENP38907 Chain 2 - 6E5A7[NKG2D]_H2L1_Fab-6A1[B7H3]_H1_L1_scFv(GKPGS)4-IgG1_pI( -)_Isosteric_A_S239D/I332E/L368D/K370S-Fc(216)_IgG1_C220S/S 364K/E357Q

SEQ ID NO: 1584 - protein, 214 aa, synthetic construct; identical to SEQ ID NO: 15
  source 1..214: note = XENP38907 Chain 3 - 6E5A7[NKG2D]_H2L1_Fab-6A1[B7H3]_H1_L1_scFv(GKPGS)4-IgG1_pI( -)_Isosteric_A_S239D/I332E/L368D/K370S-Fc(216)_IgG1_C220S/S 364K/E357Q

SEQ ID NO: 1585 - protein, 451 aa, synthetic construct; identical to SEQ ID NO: 172
  source 1..451: note = XENP38908 Chain 1 - ADI-27744_A44[NKG2D]_H0L0_Fab-6A1[B7H3]_H1_L1_scFv(GKPGS)4- IgG1_pI(-)_Isosteric_A_S239D/I332E/L368D/K370S-Fc(216)_IgG1 _C220S/S364K/E357Q

SEQ ID NO: 1586 - protein, 479 aa, synthetic construct; identical to SEQ ID NO: 1553
  source 1..479: note = XENP38908 Chain 2 - ADI-27744_A44[NKG2D]_H0L0_Fab-6A1[B7H3]_H1_L1_scFv(GKPGS)4- IgG1_pI(-)_Isosteric_A_S239D/I332E/L368D/K370S-Fc(216)_IgG1 _C220S/S364K/E357Q

SEQ ID NO: 1587 - protein, 214 aa, synthetic construct; identical to SEQ ID NO: 173
  source 1..214: note = XENP38908 Chain 3 - ADI-27744_A44[NKG2D]_H0L0_Fab-6A1[B7H3]_H1_L1_scFv(GKPGS)4- IgG1_pI(-)_Isosteric_A_S239D/I332E/L368D/K370S-Fc(216)_IgG1 _C220S/S364K/E357Q

SEQ ID NO: 1588 - protein, 452 aa, synthetic construct; identical to SEQ ID NO: 175
  source 1..452: note = XENP38909 Chain 1 - ADI-27749_A49[NKG2D]_H0L0_Fab-6A1[B7H3]_H1_L1_scFv(GKPGS)4- IgG1_pI(-)_Isosteric_A_S239D/I332E/L368D/K370S-Fc(216)_IgG1 _C220S/S364K/E357Q

SEQ ID NO: 1589 - protein, 479 aa, synthetic construct; identical to SEQ ID NO: 1553
  source 1..479: note = XENP38909 Chain 2 - ADI-27749_A49[NKG2D]_H0L0_Fab-6A1[B7H3]_H1_L1_scFv(GKPGS)4- IgG1_pI(-)_Isosteric_A_S239D/I332E/L368D/K370S-Fc(216)_IgG1 _C220S/S364K/E357Q

SEQ ID NO: 1590 - protein, 214 aa, synthetic construct; identical to SEQ ID NO: 176
  source 1..214: note = XENP38909 Chain 3 - ADI-27749_A49[NKG2D]_H0L0_Fab-6A1[B7H3]_H1_L1_scFv(GKPGS)4- IgG1_pI(-)_Isosteric_A_S239D/I332E/L368D/K370S-Fc(216)_IgG1 _C220S/S364K/E357Q

SEQ ID NO: 1591 - protein, 447 aa, synthetic construct; identical to SEQ ID NO: 1492
  source 1..447: note = XENP38910 Chain 1 - ADI-18226_C26[NKG2D]_H0L0_Fab-6A1[B7H3]_H1_L1_scFv(GKPGS)4- IgG1_pI(-)_Isosteric_A_S239D/I332E/L368D/K370S-Fc(216)_IgG1 _C220S/S364K/E357Q

SEQ ID NO: 1592 - protein, 479 aa, synthetic construct; identical to SEQ ID NO: 1553
  source 1..479: note = XENP38910 Chain 2 - ADI-18226_C26[NKG2D]_H0L0_Fab-6A1[B7H3]_H1_L1_scFv(GKPGS)4- IgG1_pI(-)_Isosteric_A_S239D/I332E/L368D/K370S-Fc(216)_IgG1 _C220S/S364K/E357Q

SEQ ID NO: 1593 - protein, 214 aa, synthetic construct; identical to SEQ ID NO: 1441
  source 1..214: note = XENP38910 Chain 3 - ADI-18226_C26[NKG2D]_H0L0_Fab-6A1[B7H3]_H1_L1_scFv(GKPGS)4- IgG1_pI(-)_Isosteric_A_S239D/I332E/L368D/K370S-Fc(216)_IgG1 _C220S/S364K/E357Q

SEQ ID NO: 1594 - protein, 451 aa, synthetic construct; identical to SEQ ID NO: 1466
  source 1..451: note = XENP39455 Chain 1 - 1D2B4[NKG2D]_H1_L1_Fab-Numax_VHVL_scFv(GKPGS)4-IgG1_pI(-)_I sosteric_A_L368D/K370S-Fc(216)_IgG1_C220S/S364K/E357Q

SEQ ID NO: 1595 - protein, 478 aa, synthetic construct; identical to SEQ ID NO: 1033
  source 1..478: note = XENP39455 Chain 2 - 1D2B4[NKG2D]_H1_L1_Fab-Numax_VHVL_scFv(GKPGS)4-IgG1_pI(-)_I sosteric_A_L368D/K370S-Fc(216)_IgG1_C220S/S364K/E357Q

SEQ ID NO: 1596 - protein, 214 aa, synthetic construct; identical to SEQ ID NO: 3
  source 1..214: note = XENP39455 Chain 3 - 1D2B4[NKG2D]_H1_L1_Fab-Numax_VHVL_scFv(GKPGS)4-IgG1_pI(-)_I sosteric_A_L368D/K370S-Fc(216)_IgG1_C220S/S364K/E357Q

SEQ ID NO: 1597 - protein, 450 aa, synthetic construct; identical to SEQ ID NO: 1356
  source 1..450: note = XENP39456 Chain 1 - 1D2B4[NKG2D]_H1_L1_Fab-Numax_VHVL_scFv(GKPGS)4-IgG1_pI(-)_I sosteric_A_PVA_/S267K/L368D/K370S-Fc(216)_IgG1_C220S/PVA_/S 267K/S364K/E357Q

SEQ ID NO: 1598 - protein, 477 aa, synthetic construct; identical to SEQ ID NO: 1097
  source 1..477: note = XENP39456 Chain 2 - 1D2B4[NKG2D]_H1_L1_Fab-Numax_VHVL_scFv(GKPGS)4-IgG1_pI(-)_I sosteric_A_PVA_/S267K/L368D/K370S-Fc(216)_IgG1_C220S/PVA_/S 267K/S364K/E357Q

SEQ ID NO: 1599 - protein, 214 aa, synthetic construct; identical to SEQ ID NO: 3
  source 1..214: note = XENP39456 Chain 3 - 1D2B4[NKG2D]_H1_L1_Fab-Numax_VHVL_scFv(GKPGS)4-IgG1_pI(-)_I sosteric_A_PVA_/S267K/L368D/K370S-Fc(216)_IgG1_C220S/PVA_/S 267K/S364K/E357Q

SEQ ID NO: 1600 - protein, 451 aa, synthetic construct; identical to SEQ ID NO: 11
  source 1..451: note = XENP39457 Chain 1 - 1D2B4[NKG2D]_H1_L1_Fab-Numax_VHVL_scFv(GKPGS)4-IgG1_pI(-)_I sosteric_A_S239D/I332E/L368D/K370S-Fc(216)_IgG1_C220S/S239D /I332E/S364K/E357Q

SEQ ID NO: 1601 - protein, 478 aa, synthetic construct; identical to SEQ ID NO: 177
  source 1..478: note = XENP39457 Chain 2 - 1D2B4[NKG2D]_H1_L1_Fab-Numax_VHVL_scFv(GKPGS)4-IgG1_pI(-)_I sosteric_A_S239D/I332E/L368D/K370S-Fc(216)_IgG1_C220S/S239D /I332E/S364K/E357Q

SEQ ID NO: 1602 - protein, 214 aa, synthetic construct; identical to SEQ ID NO: 3
  source 1..214: note = XENP39457 Chain 3 - 1D2B4[NKG2D]_H1_L1_Fab-Numax_VHVL_scFv(GKPGS)4-IgG1_pI(-)_I sosteric_A_S239D/I332E/L368D/K370S-Fc(216)_IgG1_C220S/S239D /I332E/S364K/E357Q

SEQ ID NO: 1603 - protein, 451 aa, synthetic construct; identical to SEQ ID NO: 9
  source 1..451: note = XENP39458 Chain 1 - 1D7B4[NKG2D]_H1_L1_Fab-Numax_VHVL_scFv(GKPGS)4-IgG1_pI(-)_I sosteric_A_L368D/K370S-Fc(216)_IgG1_C220S/S364K/E357Q

SEQ ID NO: 1604 - protein, 478 aa, synthetic construct; identical to SEQ ID NO: 1033
  source 1..478: note = XENP39458 Chain 2 - 1D7B4[NKG2D]_H1_L1_Fab-Numax_VHVL_scFv(GKPGS)4-IgG1_pI(-)_I sosteric_A_L368D/K370S-Fc(216)_IgG1_C220S/S364K/E357Q

SEQ ID NO: 1605 - protein, 214 aa, synthetic construct; identical to SEQ ID NO: 3
  source 1..214: note = XENP39458 Chain 3 - 1D7B4[NKG2D]_H1_L1_Fab-Numax_VHVL_scFv(GKPGS)4-IgG1_pI(-)_I sosteric_A_L368D/K370S-Fc(216)_IgG1_C220S/S364K/E357Q

SEQ ID NO: 1606 - protein, 450 aa, synthetic construct; identical to SEQ ID NO: 7
  source 1..450: note = XENP39459 Chain 1 - 1D7B4[NKG2D]_H1_L1_Fab-Numax_VHVL_scFv(GKPGS)4-IgG1_pI(-)_I sosteric_A_PVA_/S267K/L368D/K370S-Fc(216)_IgG1_C220S/PVA_/S 267K/S364K/E357Q

SEQ ID NO: 1607 - protein, 477 aa, synthetic construct; identical to SEQ ID NO: 1097
  source 1..477: note = XENP39459 Chain 2 - 1D7B4[NKG2D]_H1_L1_Fab-Numax_VHVL_scFv(GKPGS)4-IgG1_pI(-)_I sosteric_A_PVA_/S267K/L368D/K370S-Fc(216)_IgG1_C220S/PVA_/S 267K/S364K/E357Q

SEQ ID NO: 1608 - protein, 214 aa, synthetic construct; identical to SEQ ID NO: 3
  source 1..214: note = XENP39459 Chain 3 - 1D7B4[NKG2D]_H1_L1_Fab-Numax_VHVL_scFv(GKPGS)4-IgG1_pI(-)_I sosteric_A_PVA_/S267K/L368D/K370S-Fc(216)_IgG1_C220S/PVA_/S 267K/S364K/E357Q

SEQ ID NO: 1609 - protein, 452 aa, synthetic construct; identical to SEQ ID NO: 1478
  source 1..452: note = XENP39461 Chain 1 - ADI-27749_A49[NKG2D]_H0L0_Fab-Numax_VHVL_scFv(GKPGS)4-IgG1_ pI(-)_Isosteric_A_L368D/K370S-Fc(216)_IgG1_C220S/S364K/E357 Q

SEQ ID NO: 1610 - protein, 478 aa, synthetic construct; identical to SEQ ID NO: 1033
  source 1..478: note = XENP39461 Chain 2 - ADI-27749_A49[NKG2D]_H0L0_Fab-Numax_VHVL_scFv(GKPGS)4-IgG1_ pI(-)_Isosteric_A_L368D/K370S-Fc(216)_IgG1_C220S/S364K/E357 Q

SEQ ID NO: 1611 - protein, 214 aa, synthetic construct; identical to SEQ ID NO: 176
  source 1..214: note = XENP39461 Chain 3 - ADI-27749_A49[NKG2D]_H0L0_Fab-Numax_VHVL_scFv(GKPGS)4-IgG1_ pI(-)_Isosteric_A_L368D/K370S-Fc(216)_IgG1_C220S/S364K/E357 Q

SEQ ID NO: 1612 - protein, 451 aa, synthetic construct; identical to SEQ ID NO: 1460
  source 1..451: note = XENP39462 Chain 1 - ADI-27749_A49[NKG2D]_H0L0_Fab-Numax_VHVL_scFv(GKPGS)4-IgG1_ pI(-)_Isosteric_A_PVA_/S267K/L368D/K370S-Fc(216)_IgG1_C220S /PVA_/S267K/S364K/E357Q

SEQ ID NO: 1613 - protein, 477 aa, synthetic construct; identical to SEQ ID NO: 1097
  source 1..477: note = XENP39462 Chain 2 - ADI-27749_A49[NKG2D]_H0L0_Fab-Numax_VHVL_scFv(GKPGS)4-IgG1_ pI(-)_Isosteric_A_PVA_/S267K/L368D/K370S-Fc(216)_IgG1_C220S /PVA_/S267K/S364K/E357Q

SEQ ID NO: 1614 - protein, 214 aa, synthetic construct; identical to SEQ ID NO: 176
  source 1..214: note = XENP39462 Chain 3 - ADI-27749_A49[NKG2D]_H0L0_Fab-Numax_VHVL_scFv(GKPGS)4-IgG1_ pI(-)_Isosteric_A_PVA_/S267K/L368D/K370S-Fc(216)_IgG1_C220S /PVA_/S267K/S364K/E357Q

SEQ ID NO: 1615 - protein, 452 aa, synthetic construct; identical to SEQ ID NO: 175
  source 1..452: note = XENP39463 Chain 1 - ADI-27749_A49[NKG2D]_H0L0_Fab-Numax_VHVL_scFv(GKPGS)4-IgG1_ pI(-)_Isosteric_A_S239D/I332E/L368D/K370S-Fc(216)_IgG1_C220 S/S239D/I332E/S364K/E357Q

SEQ ID NO: 1616 - protein, 478 aa, synthetic construct; identical to SEQ ID NO: 177
  source 1..478: note = XENP39463 Chain 2 - ADI-27749_A49[NKG2D]_H0L0_Fab-Numax_VHVL_scFv(GKPGS)4-IgG1_ pI(-)_Isosteric_A_S239D/I332E/L368D/K370S-Fc(216)_IgG1_C220 S/S239D/I332E/S364K/E357Q

SEQ ID NO: 1617 - protein, 214 aa, synthetic construct; identical to SEQ ID NO: 176
  source 1..214: note = XENP39463 Chain 3 - ADI-27749_A49[NKG2D]_H0L0_Fab-Numax_VHVL_scFv(GKPGS)4-IgG1_ pI(-)_Isosteric_A_S239D/I332E/L368D/K370S-Fc(216)_IgG1_C220 S/S239D/I332E/S364K/E357Q

SEQ ID NO: 1618 - protein, 451 aa, synthetic construct; identical to SEQ ID NO: 1475
  source 1..451: note = XENP39872 Chain 1 - ADI-27744_A44[NKG2D]_H0L0_Fab-Numax_VHVL_scFv(GKPGS)4-IgG1_ pI(-)_Isosteric_A_L368D/K370S-Fc(216)_IgG1_C220S/S364K/E357 Q

SEQ ID NO: 1619 - protein, 478 aa, synthetic construct; identical to SEQ ID NO: 1033
  source 1..478: note = XENP39872 Chain 2 - ADI-27744_A44[NKG2D]_H0L0_Fab-Numax_VHVL_scFv(GKPGS)4-IgG1_ pI(-)_Isosteric_A_L368D/K370S-Fc(216)_IgG1_C220S/S364K/E357 Q

SEQ ID NO: 1620 - protein, 214 aa, synthetic construct; identical to SEQ ID NO: 173
  source 1..214: note = XENP39872 Chain 3 - ADI-27744_A44[NKG2D]_H0L0_Fab-Numax_VHVL_scFv(GKPGS)4-IgG1_ pI(-)_Isosteric_A_L368D/K370S-Fc(216)_IgG1_C220S/S364K/E357 Q

SEQ ID NO: 1621 - protein, 450 aa, synthetic construct; identical to SEQ ID NO: 1457
  source 1..450: note = XENP39873 Chain 1 - ADI-27744_A44[NKG2D]_H0L0_Fab-Numax_VHVL_scFv(GKPGS)4-IgG1_ pI(-)_Isosteric_A_PVA_/S267K/L368D/K370S-Fc(216)_IgG1_C220S /PVA_/S267K/S364K/E357Q

SEQ ID NO: 1622 - protein, 477 aa, synthetic construct; identical to SEQ ID NO: 1097
  source 1..477: note = XENP39873 Chain 2 - ADI-27744_A44[NKG2D]_H0L0_Fab-Numax_VHVL_scFv(GKPGS)4-IgG1_ pI(-)_Isosteric_A_PVA_/S267K/L368D/K370S-Fc(216)_IgG1_C220S /PVA_/S267K/S364K/E357Q

SEQ ID NO: 1623 - protein, 214 aa, synthetic construct; identical to SEQ ID NO: 173
  source 1..214: note = XENP39873 Chain 3 - ADI-27744_A44[NKG2D]_H0L0_Fab-Numax_VHVL_scFv(GKPGS)4-IgG1_ pI(-)_Isosteric_A_PVA_/S267K/L368D/K370S-Fc(216)_IgG1_C220S /PVA_/S267K/S364K/E357Q

SEQ ID NO: 1624 - protein, 451 aa, synthetic construct; identical to SEQ ID NO: 172
  source 1..451: note = XENP39874 Chain 1 - ADI-27744_A44[NKG2D]_H0L0_Fab-Numax_VHVL_scFv(GKPGS)4-IgG1_ pI(-)_Isosteric_A_S239D/I332E/L368D/K370S-Fc(216)_IgG1_C220 S/S239D/I332E/S364K/E357Q

SEQ ID NO: 1625 - protein, 478 aa, synthetic construct; identical to SEQ ID NO: 177
  source 1..478: note = XENP39874 Chain 2 - ADI-27744_A44[NKG2D]_H0L0_Fab-Numax_VHVL_scFv(GKPGS)4-IgG1_ pI(-)_Isosteric_A_S239D/I332E/L368D/K370S-Fc(216)_IgG1_C220 S/S239D/I332E/S364K/E357Q

SEQ ID NO: 1626 - protein, 214 aa, synthetic construct; identical to SEQ ID NO: 173
  source 1..214: note = XENP39874 Chain 3 - ADI-27744_A44[NKG2D]_H0L0_Fab-Numax_VHVL_scFv(GKPGS)4-IgG1_ pI(-)_Isosteric_A_S239D/I332E/L368D/K370S-Fc(216)_IgG1_C220 S/S239D/I332E/S364K/E357Q

SEQ ID NO: 1627 - protein, 451 aa, synthetic construct; identical to SEQ ID NO: 1475
  source 1..451: note = XENP40098 Chain 1 - ADI27744_A44[NKG2D]_H0L0_Fab-38E2[B7H3]_H2_L1.1_scFv(GKPGS) 4-IgG1_pI(-)_Isosteric_A_L368D/K370S-Fc(216)_IgG1_C220S/S36 4K/E357Q

SEQ ID NO: 1628 - protein, 479 aa, synthetic construct; identical to SEQ ID NO: 989
  source 1..479: note = XENP40098 Chain 2 - ADI27744_A44[NKG2D]_H0L0_Fab-38E2[B7H3]_H2_L1.1_scFv(GKPGS) 4-IgG1_pI(-)_Isosteric_A_L368D/K370S-Fc(216)_IgG1_C220S/S36 4K/E357Q

SEQ ID NO: 1629 - protein, 214 aa, synthetic construct; identical to SEQ ID NO: 173
  source 1..214: note = XENP40098 Chain 3 - ADI27744_A44[NKG2D]_H0L0_Fab-38E2[B7H3]_H2_L1.1_scFv(GKPGS) 4-IgG1_pI(-)_Isosteric_A_L368D/K370S-Fc(216)_IgG1_C220S/S36 4K/E357Q

SEQ ID NO: 1630 - protein, 450 aa, synthetic construct; identical to SEQ ID NO: 1457
  source 1..450: note = XENP40099 Chain 1 - ADI27744_A44[NKG2D]_H0L0_Fab-38E2[B7H3]_H2_L1.1_scFv(GKPGS) 4-IgG1_pI(-)_Isosteric_A_PVA_/S267K/L368D/K370S-Fc(216)_IgG 1_C220S/PVA_/S267K/S364K/E357Q

SEQ ID NO: 1631 - protein, 478 aa, synthetic construct
  source 1..478: note = XENP40099 Chain 2 - ADI27744_A44[NKG2D]_H0L0_Fab-38E2[B7H3]_H2_L1.1_scFv(GKPGS) 4-IgG1_pI(-)_Isosteric_A_PVA_/S267K/L368D/K370S-Fc(216)_IgG 1_C220S/PVA_/S267K/S364K/E357Q
EVQLLESGGGLVQPGGSLRLSCAVSGFSLSSYGVIWVRQAPGKGLEYVSWVSSGGSTNYASSVKGRFTISRDTSKNTVYLQMNSLRAEDTAVYFCARGATNSGTDIWGPGTLVTVSSGKPGSGKPGSGKPGSGKPGSDIVMTQSPSSLSASVGDRVTITCRASQSINSWLSWYQQKPGKPPKLLIYGASNLASGVPSRFKGSGSGTDFTLTISSLQPEDFATYYCQNNYGIIAAGATFGGGTKVEIKEPKSSDKTHTCPPCPAPPVAGPSVFLFPPKPKDTLMISRTPEVTCVVVDVKHEDPEVKFNWYVDGVEVHNAKTKPREEQYNSTYRVVSVLTVLHQDWLNGKEYKCKVSNKALPAPIEKTISKAKGQPREPQVYTLPPSREQMTKNQVKLTCLVKGFYPSDIAVEWESNGQPENNYKTTPPVLDSDGSFFLYSKLTVDKSRWQQGNVFSCSVMHEALHNHYTQKSLSLSPGK

SEQ ID NO: 1632 - protein, 214 aa, synthetic construct; identical to SEQ ID NO: 173
  source 1..214: note = XENP40099 Chain 3 - ADI27744_A44[NKG2D]_H0L0_Fab-38E2[B7H3]_H2_L1.1_scFv(GKPGS) 4-IgG1_pI(-)_Isosteric_A_PVA_/S267K/L368D/K370S-Fc(216)_IgG 1_C220S/PVA_/S267K/S364K/E357Q

SEQ ID NO: 1633 - protein, 451 aa, synthetic construct; identical to SEQ ID NO: 172
  source 1..451: note = XENP40100 Chain 1 - ADI27744_A44[NKG2D]_H0L0_Fab-38E2[B7H3]_H2_L1.1_scFv(GKPGS) 4-IgG1_pI(-)_Isosteric_A_S239D/I332E/L368D/K370S-Fc(216)_Ig G1_C220S/S239D/I332E/S364K/E357Q

SEQ ID NO: 1634 - protein, 479 aa, synthetic construct; identical to SEQ ID NO: 991
  source 1..479: note = XENP40100 Chain 2 - ADI27744_A44[NKG2D]_H0L0_Fab-38E2[B7H3]_H2_L1.1_scFv(GKPGS) 4-IgG1_pI(-)_Isosteric_A_S239D/I332E/L368D/K370S-Fc(216)_Ig G1_C220S/S239D/I332E/S364K/E357Q

SEQ ID NO: 1635 - protein, 214 aa, synthetic construct; identical to SEQ ID NO: 173
  source 1..214: note = XENP40100 Chain 3 - ADI27744_A44[NKG2D]_H0L0_Fab-38E2[B7H3]_H2_L1.1_scFv(GKPGS) 4-IgG1_pI(-)_Isosteric_A_S239D/I332E/L368D/K370S-Fc(216)_Ig G1_C220S/S239D/I332E/S364K/E357Q

SEQ ID NO: 1636 - protein, 451 aa, synthetic construct; identical to SEQ ID NO: 1466
  source 1..451: note = XENP40101 Chain 1 - 1D2B4[NKG2D]_H1L1_Fab-38E2[B7H3]_H2_L1.1_scFv(GKPGS)4-IgG1_ pI(-)_Isosteric_A_L368D/K370S-Fc(216)_IgG1_C220S/S364K/E357 Q

SEQ ID NO: 1637 - protein, 479 aa, synthetic construct; identical to SEQ ID NO: 989
  source 1..479: note = XENP40101 Chain 2 - 1D2B4[NKG2D]_H1L1_Fab-38E2[B7H3]_H2_L1.1_scFv(GKPGS)4-IgG1_ pI(-)_Isosteric_A_L368D/K370S-Fc(216)_IgG1_C220S/S364K/E357 Q

SEQ ID NO: 1638 - protein, 214 aa, synthetic construct; identical to SEQ ID NO: 3
  source 1..214: note = XENP40101 Chain 3 - 1D2B4[NKG2D]_H1L1_Fab-38E2[B7H3]_H2_L1.1_scFv(GKPGS)4-IgG1_ pI(-)_Isosteric_A_L368D/K370S-Fc(216)_IgG1_C220S/S364K/E357 Q

SEQ ID NO: 1639 - protein, 450 aa, synthetic construct; identical to SEQ ID NO: 1356
  source 1..450: note = XENP40102 Chain 1 - 1D2B4[NKG2D]_H1L1_Fab-38E2[B7H3]_H2_L1.1_scFv(GKPGS)4-IgG1_ pI(-)_Isosteric_A_PVA_/S267K/L368D/K370S-Fc(216)_IgG1_C220S /PVA_/S267K/S364K/E357Q

SEQ ID NO: 1640 - protein, 478 aa, synthetic construct; identical to SEQ ID NO: 1631
  source 1..478: note = XENP40102 Chain 2 - 1D2B4[NKG2D]_H1L1_Fab-38E2[B7H3]_H2_L1.1_scFv(GKPGS)4-IgG1_ pI(-)_Isosteric_A_PVA_/S267K/L368D/K370S-Fc(216)_IgG1_C220S /PVA_/S267K/S364K/E357Q

SEQ ID NO: 1641 - protein, 214 aa, synthetic construct; identical to SEQ ID NO: 3
  source 1..214: note = XENP40102 Chain 3 - 1D2B4[NKG2D]_H1L1_Fab-38E2[B7H3]_H2_L1.1_scFv(GKPGS)4-IgG1_ pI(-)_Isosteric_A_PVA_/S267K/L368D/K370S-Fc(216)_IgG1_C220S /PVA_/S267K/S364K/E357Q

SEQ ID NO: 1642 - protein, 451 aa, synthetic construct; identical to SEQ ID NO: 11
  source 1..451: note = XENP40103 Chain 1 - 1D2B4[NKG2D]_H1L1_Fab-38E2[B7H3]_H2_L1.1_scFv(GKPGS)4-IgG1_ pI(-)_Isosteric_A_S239D/I332E/L368D/K370S-Fc(216)_IgG1_C220 S/S239D/I332E/S364K/E357Q

SEQ ID NO: 1643 - protein, 479 aa, synthetic construct; identical to SEQ ID NO: 991
  source 1..479: note = XENP40103 Chain 2 - 1D2B4[NKG2D]_H1L1_Fab-38E2[B7H3]_H2_L1.1_scFv(GKPGS)4-IgG1_ pI(-)_Isosteric_A_S239D/I332E/L368D/K370S-Fc(216)_IgG1_C220 S/S239D/I332E/S364K/E357Q

SEQ ID NO: 1644 - protein, 214 aa, synthetic construct; identical to SEQ ID NO: 3
  source 1..214: note = XENP40103 Chain 3 - 1D2B4[NKG2D]_H1L1_Fab-38E2[B7H3]_H2_L1.1_scFv(GKPGS)4-IgG1_ pI(-)_Isosteric_A_S239D/I332E/L368D/K370S-Fc(216)_IgG1_C220 S/S239D/I332E/S364K/E357Q

SEQ ID NO: 1645 - protein, 451 aa, synthetic construct; identical to SEQ ID NO: 9
  source 1..451: note = XENP40104 Chain 1 - 1D7B4[NKG2D]_H1L1_Fab-38E2[B7H3]_H2_L1.1_scFv(GKPGS)4-IgG1_ pI(-)_Isosteric_A_L368D/K370S-Fc(216)_IgG1_C220S/S364K/E357 Q

SEQ ID NO: 1646 - protein, 479 aa, synthetic construct; identical to SEQ ID NO: 989
  source 1..479: note = XENP40104 Chain 2 - 1D7B4[NKG2D]_H1L1_Fab-38E2[B7H3]_H2_L1.1_scFv(GKPGS)4-IgG1_ pI(-)_Isosteric_A_L368D/K370S-Fc(216)_IgG1_C220S/S364K/E357 Q

SEQ ID NO: 1647 - protein, 214 aa, synthetic construct; identical to SEQ ID NO: 3
  source 1..214: note = XENP40104 Chain 3 - 1D7B4[NKG2D]_H1L1_Fab-38E2[B7H3]_H2_L1.1_scFv(GKPGS)4-IgG1_ pI(-)_Isosteric_A_L368D/K370S-Fc(216)_IgG1_C220S/S364K/E357 Q

SEQ ID NO: 1648 - protein, 450 aa, synthetic construct; identical to SEQ ID NO: 7
  source 1..450: note = XENP40105 Chain 1 - 1D7B4[NKG2D]_H1L1_Fab-38E2[B7H3]_H2_L1.1_scFv(GKPGS)4-IgG1_ pI(-)_Isosteric_A_PVA_/S267K/L368D/K370S-Fc(216)_IgG1_C220S /PVA_/S267K/S364K/E357Q

SEQ ID NO: 1649 - protein, 478 aa, synthetic construct; identical to SEQ ID NO: 1631
  source 1..478: note = XENP40105 Chain 2 - 1D7B4[NKG2D]_H1L1_Fab-38E2[B7H3]_H2_L1.1_scFv(GKPGS)4-IgG1_ pI(-)_Isosteric_A_PVA_/S267K/L368D/K370S-Fc(216)_IgG1_C220S /PVA_/S267K/S364K/E357Q

SEQ ID NO: 1650 - protein, 214 aa, synthetic construct; identical to SEQ ID NO: 3
  source 1..214: note = XENP40105 Chain 3 - 1D7B4[NKG2D]_H1L1_Fab-38E2[B7H3]_H2_L1.1_scFv(GKPGS)4-IgG1_ pI(-)_Isosteric_A_PVA_/S267K/L368D/K370S-Fc(216)_IgG1_C220S /PVA_/S267K/S364K/E357Q

SEQ ID NO: 1651 - protein, 452 aa, synthetic construct; identical to SEQ ID NO: 1469
  source 1..452: note = XENP40107 Chain 1 - humON72[NKG2D]_H1L1_Fab-38E2[B7H3]_H2_L1.1_scFv(GKPGS)4-IgG 1_pI(-)_Isosteric_A_L368D/K370S-Fc(216)_IgG1_C220S/S364K/E3 57Q

SEQ ID NO: 1652 - protein, 479 aa, synthetic construct; identical to SEQ ID NO: 989
  source 1..479: note = XENP40107 Chain 2 - humON72[NKG2D]_H1L1_Fab-38E2[B7H3]_H2_L1.1_scFv(GKPGS)4-IgG 1_pI(-)_Isosteric_A_L368D/K370S-Fc(216)_IgG1_C220S/S364K/E3 57Q

SEQ ID NO: 1653 - protein, 214 aa, synthetic construct; identical to SEQ ID NO: 13
  source 1..214: note = XENP40107 Chain 3 - humON72[NKG2D]_H1L1_Fab-38E2[B7H3]_H2_L1.1_scFv(GKPGS)4-IgG 1_pI(-)_Isosteric_A_L368D/K370S-Fc(216)_IgG1_C220S/S364K/E3 57Q

SEQ ID NO: 1654 - protein, 451 aa, synthetic construct; identical to SEQ ID NO: 1451
  source 1..451: note = XENP40108 Chain 1 - humON72[NKG2D]_H1L1_Fab-38E2[B7H3]_H2_L1.1_scFv(GKPGS)4-IgG 1_pI(-)_Isosteric_A_PVA_/S267K/L368D/K370S-Fc(216)_IgG1_C22 0S/PVA_/S267K/S364K/E357Q

SEQ ID NO: 1655 - protein, 478 aa, synthetic construct; identical to SEQ ID NO: 1631
  source 1..478: note = XENP40108 Chain 2 - humON72[NKG2D]_H1L1_Fab-38E2[B7H3]_H2_L1.1_scFv(GKPGS)4-IgG 1_pI(-)_Isosteric_A_PVA_/S267K/L368D/K370S-Fc(216)_IgG1_C22 0S/PVA_/S267K/S364K/E357Q

SEQ ID NO: 1656 - protein, 214 aa, synthetic construct; identical to SEQ ID NO: 13
  source 1..214: note = XENP40108 Chain 3 - humON72[NKG2D]_H1L1_Fab-38E2[B7H3]_H2_L1.1_scFv(GKPGS)4-IgG 1_pI(-)_Isosteric_A_PVA_/S267K/L368D/K370S-Fc(216)_IgG1_C22 0S/PVA_/S267K/S364K/E357Q

SEQ ID NO: 1657 - protein, 452 aa, synthetic construct; identical to SEQ ID NO: 12
  source 1..452: note = XENP40109 Chain 1 - humON72[NKG2D]_H1L1_Fab-38E2[B7H3]_H2_L1.1_scFv(GKPGS)4-IgG 1_pI(-)_Isosteric_A_S239D/I332E/L368D/K370S-Fc(216)_IgG1_C2 20S/S239D/I332E/S364K/E357Q

SEQ ID NO: 1658 - protein, 479 aa, synthetic construct; identical to SEQ ID NO: 991
  source 1..479: note = XENP40109 Chain 2 - humON72[NKG2D]_H1L1_Fab-38E2[B7H3]_H2_L1.1_scFv(GKPGS)4-IgG 1_pI(-)_Isosteric_A_S239D/I332E/L368D/K370S-Fc(216)_IgG1_C2 20S/S239D/I332E/S364K/E357Q

SEQ ID NO: 1659 - protein, 214 aa, synthetic construct; identical to SEQ ID NO: 13
  source 1..214: note = XENP40109 Chain 3 - humON72[NKG2D]_H1L1_Fab-38E2[B7H3]_H2_L1.1_scFv(GKPGS)4-IgG 1_pI(-)_Isosteric_A_S239D/I332E/L368D/K370S-Fc(216)_IgG1_C2 20S/S239D/I332E/S364K/E357Q

SEQ ID NO: 1660 - protein, 451 aa, synthetic construct; identical to SEQ ID NO: 1475
  source 1..451: note = XENP40113 Chain 1 - ADI27744_A44[NKG2D]_H0L0_Fab-38E2[B7H3]_L1.1_H2_scFv(GKPGS) 4-IgG1_pI(-)_Isosteric_A_L368D/K370S-Fc(216)_IgG1_C220S/S36 4K/E357Q

SEQ ID NO: 1661 - protein, 479 aa, synthetic construct
  source 1..479: note = XENP40113 Chain 2 - ADI27744_A44[NKG2D]_H0L0_Fab-38E2[B7H3]_L1.1_H2_scFv(GKPGS) 4-IgG1_pI(-)_Isosteric_A_L368D/K370S-Fc(216)_IgG1_C220S/S36 4K/E357Q
DIVMTQSPSSLSASVGDRVTITCRASQSINSWLSWYQQKPGKPPKLLIYGASNLASGVPSRFKGSGSGTDFTLTISSLQPEDFATYYCQNNYGIIAAGATFGGGTKVEIKGKPGSGKPGSGKPGSGKPGSEVQLLESGGGLVQPGGSLRLSCAVSGFSLSSYGVIWVRQAPGKGLEYVSWVSSGGSTNYASSVKGRFTISRDTSKNTVYLQMNSLRAEDTAVYFCARGATNSGTDIWGPGTLVTVSSEPKSSDKTHTCPPCPAPELLGGPSVFLFPPKPKDTLMISRTPEVTCVVVDVSHEDPEVKFNWYVDGVEVHNAKTKPREEQYNSTYRVVSVLTVLHQDWLNGKEYKCKVSNKALPAPIEKTISKAKGQPREPQVYTLPPSREQMTKNQVKLTCLVKGFYPSDIAVEWESNGQPENNYKTTPPVLDSDGSFFLYSKLTVDKSRWQQGNVFSCSVMHEALHNHYTQKSLSLSPGK

SEQ ID NO: 1662 - protein, 214 aa, synthetic construct; identical to SEQ ID NO: 173
  source 1..214: note = XENP40113 Chain 3 - ADI27744_A44[NKG2D]_H0L0_Fab-38E2[B7H3]_L1.1_H2_scFv(GKPGS) 4-IgG1_pI(-)_Isosteric_A_L368D/K370S-Fc(216)_IgG1_C220S/S36 4K/E357Q

SEQ ID NO: 1663 - protein, 450 aa, synthetic construct; identical to SEQ ID NO: 1457
  source 1..450: note = XENP40114 Chain 1 - ADI27744_A44[NKG2D]_H0L0_Fab-38E2[B7H3]_L1.1_H2_scFv(GKPGS) 4-IgG1_pI(-)_Isosteric_A_PVA_/S267K/L368D/K370S-Fc(216)_IgG 1_C220S/PVA_/S267K/S364K/E357Q

SEQ ID NO: 1664 - protein, 478 aa, synthetic construct
  source 1..478: note = XENP40114 Chain 2 - ADI27744_A44[NKG2D]_H0L0_Fab-38E2[B7H3]_L1.1_H2_scFv(GKPGS) 4-IgG1_pI(-)_Isosteric_A_PVA_/S267K/L368D/K370S-Fc(216)_IgG 1_C220S/PVA_/S267K/S364K/E357Q
DIVMTQSPSSLSASVGDRVTITCRASQSINSWLSWYQQKPGKPPKLLIYGASNLASGVPSRFKGSGSGTDFTLTISSLQPEDFATYYCQNNYGIIAAGATFGGGTKVEIKGKPGSGKPGSGKPGSGKPGSEVQLLESGGGLVQPGGSLRLSCAVSGFSLSSYGVIWVRQAPGKGLEYVSWVSSGGSTNYASSVKGRFTISRDTSKNTVYLQMNSLRAEDTAVYFCARGATNSGTDIWGPGTLVTVSSEPKSSDKTHTCPPCPAPPVAGPSVFLFPPKPKDTLMISRTPEVTCVVVDVKHEDPEVKFNWYVDGVEVHNAKTKPREEQYNSTYRVVSVLTVLHQDWLNGKEYKCKVSNKALPAPIEKTISKAKGQPREPQVYTLPPSREQMTKNQVKLTCLVKGFYPSDIAVEWESNGQPENNYKTTPPVLDSDGSFFLYSKLTVDKSRWQQGNVFSCSVMHEALHNHYTQKSLSLSPGK

SEQ ID NO: 1665 - protein, 214 aa, synthetic construct; identical to SEQ ID NO: 173
  source 1..214: note = XENP40114 Chain 3 - ADI27744_A44[NKG2D]_H0L0_Fab-38E2[B7H3]_L1.1_H2_scFv(GKPGS) 4-IgG1_pI(-)_Isosteric_A_PVA_/S267K/L368D/K370S-Fc(216)_IgG 1_C220S/PVA_/S267K/S364K/E357Q

SEQ ID NO: 1666 - protein, 451 aa, synthetic construct; identical to SEQ ID NO: 172
  source 1..451: note = XENP40115 Chain 1 - ADI27744_A44[NKG2D]_H0L0_Fab-38E2[B7H3]_L1.1_H2_scFv(GKPGS) 4-IgG1_pI(-)_Isosteric_A_S239D/I332E/L368D/K370S-Fc(216)_Ig G1_C220S/S239D/I332E/S364K/E357Q

SEQ ID NO: 1667 - protein, 479 aa, synthetic construct
  source 1..479: note = XENP40115 Chain 2 - ADI27744_A44[NKG2D]_H0L0_Fab-38E2[B7H3]_L1.1_H2_scFv(GKPGS) 4-IgG1_pI(-)_Isosteric_A_S239D/I332E/L368D/K370S-Fc(216)_Ig G1_C220S/S239D/I332E/S364K/E357Q
DIVMTQSPSSLSASVGDRVTITCRASQSINSWLSWYQQKPGKPPKLLIYGASNLASGVPSRFKGSGSGTDFTLTISSLQPEDFATYYCQNNYGIIAAGATFGGGTKVEIKGKPGSGKPGSGKPGSGKPGSEVQLLESGGGLVQPGGSLRLSCAVSGFSLSSYGVIWVRQAPGKGLEYVSWVSSGGSTNYASSVKGRFTISRDTSKNTVYLQMNSLRAEDTAVYFCARGATNSGTDIWGPGTLVTVSSEPKSSDKTHTCPPCPAPELLGGPDVFLFPPKPKDTLMISRTPEVTCVVVDVSHEDPEVKFNWYVDGVEVHNAKTKPREEQYNSTYRVVSVLTVLHQDWLNGKEYKCKVSNKALPAPEEKTISKAKGQPREPQVYTLPPSREQMTKNQVKLTCLVKGFYPSDIAVEWESNGQPENNYKTTPPVLDSDGSFFLYSKLTVDKSRWQQGNVFSCSVMHEALHNHYTQKSLSLSPGK

SEQ ID NO: 1668 - protein, 214 aa, synthetic construct; identical to SEQ ID NO: 173
  source 1..214: note = XENP40115 Chain 3 - ADI27744_A44[NKG2D]_H0L0_Fab-38E2[B7H3]_L1.1_H2_scFv(GKPGS) 4-IgG1_pI(-)_Isosteric_A_S239D/I332E/L368D/K370S-Fc(216)_Ig G1_C220S/S239D/I332E/S364K/E357Q

SEQ ID NO: 1669 - protein, 451 aa, synthetic construct; identical to SEQ ID NO: 1466
  source 1..451: note = XENP40116 Chain 1 - 1D2B4[NKG2D]_H1L1_Fab-38E2[B7H3]_L1.1_H2_scFv(GKPGS)4-IgG1_ pI(-)_Isosteric_A_L368D/K370S-Fc(216)_IgG1_C220S/S364K/E357 Q

SEQ ID NO: 1670 - protein, 479 aa, synthetic construct; identical to SEQ ID NO: 1661
  source 1..479: note = XENP40116 Chain 2 - 1D2B4[NKG2D]_H1L1_Fab-38E2[B7H3]_L1.1_H2_scFv(GKPGS)4-IgG1_ pI(-)_Isosteric_A_L368D/K370S-Fc(216)_IgG1_C220S/S364K/E357 Q

SEQ ID NO: 1671 - protein, 214 aa, synthetic construct; identical to SEQ ID NO: 3
  source 1..214: note = XENP40116 Chain 3 - 1D2B4[NKG2D]_H1L1_Fab-38E2[B7H3]_L1.1_H2_scFv(GKPGS)4-IgG1_ pI(-)_Isosteric_A_L368D/K370S-Fc(216)_IgG1_C220S/S364K/E357 Q

SEQ ID NO: 1672 - protein, 450 aa, synthetic construct; identical to SEQ ID NO: 1356
  source 1..450: note = XENP40117 Chain 1 - 1D2B4[NKG2D]_H1L1_Fab-38E2[B7H3]_L1.1_H2_scFv(GKPGS)4-IgG1_ pI(-)_Isosteric_A_PVA_/S267K/L368D/K370S-Fc(216)_IgG1_C220S /PVA_/S267K/S364K/E357Q

SEQ ID NO: 1673 - protein, 478 aa, synthetic construct; identical to SEQ ID NO: 1664
  source 1..478: note = XENP40117 Chain 2 - 1D2B4[NKG2D]_H1L1_Fab-38E2[B7H3]_L1.1_H2_scFv(GKPGS)4-IgG1_ pI(-)_Isosteric_A_PVA_/S267K/L368D/K370S-Fc(216)_IgG1_C220S /PVA_/S267K/S364K/E357Q

SEQ ID NO: 1674 - protein, 214 aa, synthetic construct; identical to SEQ ID NO: 3
  source 1..214: note = XENP40117 Chain 3 - 1D2B4[NKG2D]_H1L1_Fab-38E2[B7H3]_L1.1_H2_scFv(GKPGS)4-IgG1_ pI(-)_Isosteric_A_PVA_/S267K/L368D/K370S-Fc(216)_IgG1_C220S /PVA_/S267K/S364K/E357Q

SEQ ID NO: 1675 - protein, 451 aa, synthetic construct; identical to SEQ ID NO: 11
  source 1..451: note = XENP40118 Chain 1 - 1D2B4[NKG2D]_H1L1_Fab-38E2[B7H3]_L1.1_H2_scFv(GKPGS)4-IgG1_ pI(-)_Isosteric_A_S239D/I332E/L368D/K370S-Fc(216)_IgG1_C220 S/S239D/I332E/S364K/E357Q

SEQ ID NO: 1676 - protein, 479 aa, synthetic construct; identical to SEQ ID NO: 1667
  source 1..479: note = XENP40118 Chain 2 - 1D2B4[NKG2D]_H1L1_Fab-38E2[B7H3]_L1.1_H2_scFv(GKPGS)4-IgG1_ pI(-)_Isosteric_A_S239D/I332E/L368D/K370S-Fc(216)_IgG1_C220 S/S239D/I332E/S364K/E357Q

SEQ ID NO: 1677 - protein, 214 aa, synthetic construct; identical to SEQ ID NO: 3
  source 1..214: note = XENP40118 Chain 3 - 1D2B4[NKG2D]_H1L1_Fab-38E2[B7H3]_L1.1_H2_scFv(GKPGS)4-IgG1_ pI(-)_Isosteric_A_S239D/I332E/L368D/K370S-Fc(216)_IgG1_C220 S/S239D/I332E/S364K/E357Q

SEQ ID NO: 1678 - protein, 451 aa, synthetic construct; identical to SEQ ID NO: 9
  source 1..451: note = XENP40119 Chain 1 - 1D7B4[NKG2D]_H1L1_Fab-38E2[B7H3]_L1.1_H2_scFv(GKPGS)4-IgG1_ pI(-)_Isosteric_A_L368D/K370S-Fc(216)_IgG1_C220S/S364K/E357 Q

SEQ ID NO: 1679 - protein, 479 aa, synthetic construct; identical to SEQ ID NO: 1661
  source 1..479: note = XENP40119 Chain 2 - 1D7B4[NKG2D]_H1L1_Fab-38E2[B7H3]_L1.1_H2_scFv(GKPGS)4-IgG1_ pI(-)_Isosteric_A_L368D/K370S-Fc(216)_IgG1_C220S/S364K/E357 Q

SEQ ID NO: 1680 - protein, 214 aa, synthetic construct; identical to SEQ ID NO: 3
  source 1..214: note = XENP40119 Chain 3 - 1D7B4[NKG2D]_H1L1_Fab-38E2[B7H3]_L1.1_H2_scFv(GKPGS)4-IgG1_ pI(-)_Isosteric_A_L368D/K370S-Fc(216)_IgG1_C220S/S364K/E357 Q

SEQ ID NO: 1681 - protein, 450 aa, synthetic construct; identical to SEQ ID NO: 7
  source 1..450: note = XENP40120 Chain 1 - 1D7B4[NKG2D]_H1L1_Fab-38E2[B7H3]_L1.1_H2_scFv(GKPGS)4-IgG1_ pI(-)_Isosteric_A_PVA_/S267K/L368D/K370S-Fc(216)_IgG1_C220S /PVA_/S267K/S364K/E357Q

SEQ ID NO: 1682 - protein, 478 aa, synthetic construct; identical to SEQ ID NO: 1664
  source 1..478: note = XENP40120 Chain 2 - 1D7B4[NKG2D]_H1L1_Fab-38E2[B7H3]_L1.1_H2_scFv(GKPGS)4-IgG1_ pI(-)_Isosteric_A_PVA_/S267K/L368D/K370S-Fc(216)_IgG1_C220S /PVA_/S267K/S364K/E357Q

SEQ ID NO: 1683 - protein, 214 aa, synthetic construct; identical to SEQ ID NO: 3
  source 1..214: note = XENP40120 Chain 3 - 1D7B4[NKG2D]_H1L1_Fab-38E2[B7H3]_L1.1_H2_scFv(GKPGS)4-IgG1_ pI(-)_Isosteric_A_PVA_/S267K/L368D/K370S-Fc(216)_IgG1_C220S /PVA_/S267K/S364K/E357Q

SEQ ID NO: 1684 - protein, 451 aa, synthetic construct; identical to SEQ ID NO: 1
  source 1..451: note = XENP40121 Chain 1 - 1D7B4[NKG2D]_H1L1_Fab-38E2[B7H3]_L1.1_H2_scFv(GKPGS)4-IgG1_ pI(-)_Isosteric_A_S239D/I332E/L368D/K370S-Fc(216)_IgG1_C220 S/S239D/I332E/S364K/E357Q

SEQ ID NO: 1685 - protein, 479 aa, synthetic construct; identical to SEQ ID NO: 1667
  source 1..479: note = XENP40121 Chain 2 - 1D7B4[NKG2D]_H1L1_Fab-38E2[B7H3]_L1.1_H2_scFv(GKPGS)4-IgG1_ pI(-)_Isosteric_A_S239D/I332E/L368D/K370S-Fc(216)_IgG1_C220 S/S239D/I332E/S364K/E357Q

SEQ ID NO: 1686 - protein, 214 aa, synthetic construct; identical to SEQ ID NO: 3
  source 1..214: note = XENP40121 Chain 3 - 1D7B4[NKG2D]_H1L1_Fab-38E2[B7H3]_L1.1_H2_scFv(GKPGS)4-IgG1_ pI(-)_Isosteric_A_S239D/I332E/L368D/K370S-Fc(216)_IgG1_C220 S/S239D/I332E/S364K/E357Q

SEQ ID NO: 1687 - protein, 452 aa, synthetic construct; identical to SEQ ID NO: 1469
  source 1..452: note = XENP40122 Chain 1 - humON72[NKG2D]_H1L1_Fab-38E2[B7H3]_L1.1_H2_scFv(GKPGS)4-IgG 1_pI(-)_Isosteric_A_L368D/K370S-Fc(216)_IgG1_C220S/S364K/E3 57Q

SEQ ID NO: 1688 - protein, 479 aa, synthetic construct; identical to SEQ ID NO: 1661
  source 1..479: note = XENP40122 Chain 2 - humON72[NKG2D]_H1L1_Fab-38E2[B7H3]_L1.1_H2_scFv(GKPGS)4-IgG 1_pI(-)_Isosteric_A_L368D/K370S-Fc(216)_IgG1_C220S/S364K/E3 57Q

SEQ ID NO: 1689 - protein, 214 aa, synthetic construct; identical to SEQ ID NO: 13
  source 1..214: note = XENP40122 Chain 3 - humON72[NKG2D]_H1L1_Fab-38E2[B7H3]_L1.1_H2_scFv(GKPGS)4-IgG 1_pI(-)_Isosteric_A_L368D/K370S-Fc(216)_IgG1_C220S/S364K/E3 57Q

SEQ ID NO: 1690 - protein, 451 aa, synthetic construct; identical to SEQ ID NO: 1451
  source 1..451: note = XENP40123 Chain 1 - humON72[NKG2D]_H1L1_Fab-38E2[B7H3]_L1.1_H2_scFv(GKPGS)4-IgG 1_pI(-)_Isosteric_A_PVA_/S267K/L368D/K370S-Fc(216)_IgG1_C22 0S/PVA_/S267K/S364K/E357Q

SEQ ID NO: 1691 - protein, 478 aa, synthetic construct; identical to SEQ ID NO: 1664
  source 1..478: note = XENP40123 Chain 2 - humON72[NKG2D]_H1L1_Fab-38E2[B7H3]_L1.1_H2_scFv(GKPGS)4-IgG 1_pI(-)_Isosteric_A_PVA_/S267K/L368D/K370S-Fc(216)_IgG1_C22 0S/PVA_/S267K/S364K/E357Q

SEQ ID NO: 1692 - protein, 214 aa, synthetic construct; identical to SEQ ID NO: 13
  source 1..214: note = XENP40123 Chain 3 - humON72[NKG2D]_H1L1_Fab-38E2[B7H3]_L1.1_H2_scFv(GKPGS)4-IgG 1_pI(-)_Isosteric_A_PVA_/S267K/L368D/K370S-Fc(216)_IgG1_C22 0S/PVA_/S267K/S364K/E357Q

SEQ ID NO: 1693 - protein, 452 aa, synthetic construct; identical to SEQ ID NO: 12
  source 1..452: note = XENP40124 Chain 1 - humON72[NKG2D]_H1L1_Fab-38E2[B7H3]_L1.1_H2_scFv(GKPGS)4-IgG 1_pI(-)_Isosteric_A_S239D/I332E/L368D/K370S-Fc(216)_IgG1_C2 20S/S239D/I332E/S364K/E357Q

SEQ ID NO: 1694 - protein, 479 aa, synthetic construct; identical to SEQ ID NO: 1667
  source 1..479: note = XENP40124 Chain 2 - humON72[NKG2D]_H1L1_Fab-38E2[B7H3]_L1.1_H2_scFv(GKPGS)4-IgG 1_pI(-)_Isosteric_A_S239D/I332E/L368D/K370S-Fc(216)_IgG1_C2 20S/S239D/I332E/S364K/E357Q

SEQ ID NO: 1695 - protein, 214 aa, synthetic construct; identical to SEQ ID NO: 13
  source 1..214: note = XENP40124 Chain 3 - humON72[NKG2D]_H1L1_Fab-38E2[B7H3]_L1.1_H2_scFv(GKPGS)4-IgG 1_pI(-)_Isosteric_A_S239D/I332E/L368D/K370S-Fc(216)_IgG1_C2 20S/S239D/I332E/S364K/E357Q

SEQ ID NO: 1696 - protein, 451 aa, synthetic construct; identical to SEQ ID NO: 1475
  source 1..451: note = XENP40128 Chain 1 - ADI27744_A44[NKG2D]_H1L1_Fab-ADI27744_A44[NKG2D]_H1L1_Fab_( G4S)2_38E2[B7H3]_H2_L1.1_scFv(GKPGS)4_(G4S)2-IgG1_pI(-)_Iso steric_A_L368D/K370S-Fc(222)_IgG1_/S364K/E357Q

SEQ ID NO: 1697 - protein, 717 aa, synthetic construct
  source 1..717: note = XENP40128 Chain 2 - ADI27744_A44[NKG2D]_H1L1_Fab-ADI27744_A44[NKG2D]_H1L1_Fab_( G4S)2_38E2[B7H3]_H2_L1.1_scFv(GKPGS)4_(G4S)2-IgG1_pI(-)_Iso steric_A_L368D/K370S-Fc(222)_IgG1_/S364K/E357Q
EVQLLESGGGLVQPGGSLRLSCAASGFTFSSYAMSWVRQAPGKGLEWVSAISGSGGSTYYADSVKGRFTISRDNSKNTLYLQMNSLRAEDTAVYYCAKDGGYYDSGAGDYWGQGTLVTVSSASTKGPSVFPLAPSSKSTSGGTAALGCLVKDYFPEPVTVSWNSGALTSGVHTFPAVLQSSGLYSLSSVVTVPSSSLGTQTYICNVNHKPSNTKVDKKVEPKSCGGGGSGGGGSEVQLLESGGGLVQPGGSLRLSCAVSGFSLSSYGVIWVRQAPGKGLEYVSWVSSGGSTNYASSVKGRFTISRDTSKNTVYLQMNSLRAEDTAVYFCARGATNSGTDIWGPGTLVTVSSGKPGSGKPGSGKPGSGKPGSDIVMTQSPSSLSASVGDRVTITCRASQSINSWLSWYQQKPGKPPKLLIYGASNLASGVPSRFKGSGSGTDFTLTISSLQPEDFATYYCQNNYGIIAAGATFGGGTKVEIKGGGGSGGGGSKTHTCPPCPAPELLGGPSVFLFPPKPKDTLMISRTPEVTCVVVDVSHEDPEVKFNWYVDGVEVHNAKTKPREEQYNSTYRVVSVLTVLHQDWLNGKEYKCKVSNKALPAPIEKTISKAKGQPREPQVYTLPPSREQMTKNQVKLTCLVKGFYPSDIAVEWESNGQPENNYKTTPPVLDSDGSFFLYSKLTVDKSRWQQGNVFSCSVMHEALHNHYTQKSLSLSPGK

SEQ ID NO: 1698 - protein, 214 aa, synthetic construct; identical to SEQ ID NO: 173
  source 1..214: note = XENP40128 Chain 3 - ADI27744_A44[NKG2D]_H1L1_Fab-ADI27744_A44[NKG2D]_H1L1_Fab_( G4S)2_38E2[B7H3]_H2_L1.1_scFv(GKPGS)4_(G4S)2-IgG1_pI(-)_Iso steric_A_L368D/K370S-Fc(222)_IgG1_/S364K/E357Q

SEQ ID NO: 1699 - protein, 450 aa, synthetic construct; identical to SEQ ID NO: 1457
  source 1..450: note = XENP40129 Chain 1 - ADI27744_A44[NKG2D]_H1L1_Fab-ADI27744_A44[NKG2D]_H1L1_Fab_( G4S)2_38E2[B7H3]_H2_L1.1_scFv(GKPGS)4_(G4S)2-IgG1_pI(-)_Iso steric_A_PVA_/S267K/L368D/K370S-Fc(222)_IgG1_/PVA_/S267K/S3 64K/E357Q

SEQ ID NO: 1700 - protein, 716 aa, synthetic construct
  source 1..716: note = XENP40129 Chain 2 - ADI27744_A44[NKG2D]_H1L1_Fab-ADI27744_A44[NKG2D]_H1L1_Fab_( G4S)2_38E2[B7H3]_H2_L1.1_scFv(GKPGS)4_(G4S)2-IgG1_pI(-)_Iso steric_A_PVA_/S267K/L368D/K370S-Fc(222)_IgG1_/PVA_/S267K/S3 64K/E357Q
EVQLLESGGGLVQPGGSLRLSCAASGFTFSSYAMSWVRQAPGKGLEWVSAISGSGGSTYYADSVKGRFTISRDNSKNTLYLQMNSLRAEDTAVYYCAKDGGYYDSGAGDYWGQGTLVTVSSASTKGPSVFPLAPSSKSTSGGTAALGCLVKDYFPEPVTVSWNSGALTSGVHTFPAVLQSSGLYSLSSVVTVPSSSLGTQTYICNVNHKPSNTKVDKKVEPKSCGGGGSGGGGSEVQLLESGGGLVQPGGSLRLSCAVSGFSLSSYGVIWVRQAPGKGLEYVSWVSSGGSTNYASSVKGRFTISRDTSKNTVYLQMNSLRAEDTAVYFCARGATNSGTDIWGPGTLVTVSSGKPGSGKPGSGKPGSGKPGSDIVMTQSPSSLSASVGDRVTITCRASQSINSWLSWYQQKPGKPPKLLIYGASNLASGVPSRFKGSGSGTDFTLTISSLQPEDFATYYCQNNYGIIAAGATFGGGTKVEIKGGGGSGGGGSKTHTCPPCPAPPVAGPSVFLFPPKPKDTLMISRTPEVTCVVVDVKHEDPEVKFNWYVDGVEVHNAKTKPREEQYNSTYRVVSVLTVLHQDWLNGKEYKCKVSNKALPAPIEKTISKAKGQPREPQVYTLPPSREQMTKNQVKLTCLVKGFYPSDIAVEWESNGQPENNYKTTPPVLDSDGSFFLYSKLTVDKSRWQQGNVFSCSVMHEALHNHYTQKSLSLSPGK

SEQ ID NO: 1701 - protein, 214 aa, synthetic construct; identical to SEQ ID NO: 173
  source 1..214: note = XENP40129 Chain 3 - ADI27744_A44[NKG2D]_H1L1_Fab-ADI27744_A44[NKG2D]_H1L1_Fab_( G4S)2_38E2[B7H3]_H2_L1.1_scFv(GKPGS)4_(G4S)2-IgG1_pI(-)_Iso steric_A_PVA_/S267K/L368D/K370S-Fc(222)_IgG1_/PVA_/S267K/S3 64K/E357Q

SEQ ID NO: 1702 - protein, 451 aa, synthetic construct; identical to SEQ ID NO: 172
  source 1..451: note = XENP40130 Chain 1 - ADI27744_A44[NKG2D]_H1L1_Fab-ADI27744_A44[NKG2D]_H1L1_Fab_( G4S)2_38E2[B7H3]_H2_L1.1_scFv(GKPGS)4_(G4S)2-IgG1_pI(-)_Iso steric_A_S239D/I332E/L368D/K370S-Fc(222)_IgG1_/S239D/I332E/ S364K/E357Q

SEQ ID NO: 1703 - protein, 717 aa, synthetic construct
  source 1..717: note = XENP40130 Chain 2 - ADI27744_A44[NKG2D]_H1L1_Fab-ADI27744_A44[NKG2D]_H1L1_Fab_( G4S)2_38E2[B7H3]_H2_L1.1_scFv(GKPGS)4_(G4S)2-IgG1_pI(-)_Iso steric_A_S239D/I332E/L368D/K370S-Fc(222)_IgG1_/S239D/I332E/ S364K/E357Q
EVQLLESGGGLVQPGGSLRLSCAASGFTFSSYAMSWVRQAPGKGLEWVSAISGSGGSTYYADSVKGRFTISRDNSKNTLYLQMNSLRAEDTAVYYCAKDGGYYDSGAGDYWGQGTLVTVSSASTKGPSVFPLAPSSKSTSGGTAALGCLVKDYFPEPVTVSWNSGALTSGVHTFPAVLQSSGLYSLSSVVTVPSSSLGTQTYICNVNHKPSNTKVDKKVEPKSCGGGGSGGGGSEVQLLESGGGLVQPGGSLRLSCAVSGFSLSSYGVIWVRQAPGKGLEYVSWVSSGGSTNYASSVKGRFTISRDTSKNTVYLQMNSLRAEDTAVYFCARGATNSGTDIWGPGTLVTVSSGKPGSGKPGSGKPGSGKPGSDIVMTQSPSSLSASVGDRVTITCRASQSINSWLSWYQQKPGKPPKLLIYGASNLASGVPSRFKGSGSGTDFTLTISSLQPEDFATYYCQNNYGIIAAGATFGGGTKVEIKGGGGSGGGGSKTHTCPPCPAPELLGGPDVFLFPPKPKDTLMISRTPEVTCVVVDVSHEDPEVKFNWYVDGVEVHNAKTKPREEQYNSTYRVVSVLTVLHQDWLNGKEYKCKVSNKALPAPEEKTISKAKGQPREPQVYTLPPSREQMTKNQVKLTCLVKGFYPSDIAVEWESNGQPENNYKTTPPVLDSDGSFFLYSKLTVDKSRWQQGNVFSCSVMHEALHNHYTQKSLSLSPGK

SEQ ID NO: 1704 - protein, 214 aa, synthetic construct; identical to SEQ ID NO: 173
  source 1..214: note = XENP40130 Chain 3 - ADI27744_A44[NKG2D]_H1L1_Fab-ADI27744_A44[NKG2D]_H1L1_Fab_( G4S)2_38E2[B7H3]_H2_L1.1_scFv(GKPGS)4_(G4S)2-IgG1_pI(-)_Iso steric_A_S239D/I332E/L368D/K370S-Fc(222)_IgG1_/S239D/I332E/ S364K/E357Q

SEQ ID NO: 1705 - protein, 451 aa, synthetic construct; identical to SEQ ID NO: 1466
  source 1..451: note = XENP40131 Chain 1 - 1D2B4[NKG2D]_H1L1_Fab-1D2B4[NKG2D]_H1L1_Fab_(G4S)2_38E2[B7H 3]_H2_L1.1_scFv(GKPGS)4_(G4S)2-IgG1_pI(-)_Isosteric_A_L368D /K370S-Fc(222)_IgG1_/S364K/E357Q

SEQ ID NO: 1706 - protein, 717 aa, synthetic construct
  source 1..717: note = XENP40131 Chain 2 - 1D2B4[NKG2D]_H1L1_Fab-1D2B4[NKG2D]_H1L1_Fab_(G4S)2_38E2[B7H 3]_H2_L1.1_scFv(GKPGS)4_(G4S)2-IgG1_pI(-)_Isosteric_A_L368D /K370S-Fc(222)_IgG1_/S364K/E357Q
EVQLLESGGGLVQPGGSLRLSCAASGFTFSSFGMSWVRQAPGKGLEWVSTISGSGSTTYYADSVKGRFTISRDNSKNTLYLQMNSLRAEDTAVYYCAKGVFSEWHYYFDYWGQGTLVTVSSASTKGPSVFPLAPSSKSTSGGTAALGCLVKDYFPEPVTVSWNSGALTSGVHTFPAVLQSSGLYSLSSVVTVPSSSLGTQTYICNVNHKPSNTKVDKKVEPKSCGGGGSGGGGSEVQLLESGGGLVQPGGSLRLSCAVSGFSLSSYGVIWVRQAPGKGLEYVSWVSSGGSTNYASSVKGRFTISRDTSKNTVYLQMNSLRAEDTAVYFCARGATNSGTDIWGPGTLVTVSSGKPGSGKPGSGKPGSGKPGSDIVMTQSPSSLSASVGDRVTITCRASQSINSWLSWYQQKPGKPPKLLIYGASNLASGVPSRFKGSGSGTDFTLTISSLQPEDFATYYCQNNYGIIAAGATFGGGTKVEIKGGGGSGGGGSKTHTCPPCPAPELLGGPSVFLFPPKPKDTLMISRTPEVTCVVVDVSHEDPEVKFNWYVDGVEVHNAKTKPREEQYNSTYRVVSVLTVLHQDWLNGKEYKCKVSNKALPAPIEKTISKAKGQPREPQVYTLPPSREQMTKNQVKLTCLVKGFYPSDIAVEWESNGQPENNYKTTPPVLDSDGSFFLYSKLTVDKSRWQQGNVFSCSVMHEALHNHYTQKSLSLSPGK

SEQ ID NO: 1707 - protein, 214 aa, synthetic construct; identical to SEQ ID NO: 3
  source 1..214: note = XENP40131 Chain 3 - 1D2B4[NKG2D]_H1L1_Fab-1D2B4[NKG2D]_H1L1_Fab_(G4S)2_38E2[B7H 3]_H2_L1.1_scFv(GKPGS)4_(G4S)2-IgG1_pI(-)_Isosteric_A_L368D /K370S-Fc(222)_IgG1_/S364K/E357Q

SEQ ID NO: 1708 - protein, 450 aa, synthetic construct; identical to SEQ ID NO: 1356
  source 1..450: note = XENP40132 Chain 1 - 1D2B4[NKG2D]_H1L1_Fab-1D2B4[NKG2D]_H1L1_Fab_(G4S)2_38E2[B7H 3]_H2_L1.1_scFv(GKPGS)4_(G4S)2-IgG1_pI(-)_Isosteric_A_PVA_/ S267K/L368D/K370S-Fc(222)_IgG1_/PVA_/S267K/S364K/E357Q

SEQ ID NO: 1709 - protein, 716 aa, synthetic construct
  source 1..716: note = XENP40132 Chain 2 - 1D2B4[NKG2D]_H1L1_Fab-1D2B4[NKG2D]_H1L1_Fab_(G4S)2_38E2[B7H 3]_H2_L1.1_scFv(GKPGS)4_(G4S)2-IgG1_pI(-)_Isosteric_A_PVA_/ S267K/L368D/K370S-Fc(222)_IgG1_/PVA_/S267K/S364K/E357Q
EVQLLESGGGLVQPGGSLRLSCAASGFTFSSFGMSWVRQAPGKGLEWVSTISGSGSTTYYADSVKGRFTISRDNSKNTLYLQMNSLRAEDTAVYYCAKGVFSEWHYYFDYWGQGTLVTVSSASTKGPSVFPLAPSSKSTSGGTAALGCLVKDYFPEPVTVSWNSGALTSGVHTFPAVLQSSGLYSLSSVVTVPSSSLGTQTYICNVNHKPSNTKVDKKVEPKSCGGGGSGGGGSEVQLLESGGGLVQPGGSLRLSCAVSGFSLSSYGVIWVRQAPGKGLEYVSWVSSGGSTNYASSVKGRFTISRDTSKNTVYLQMNSLRAEDTAVYFCARGATNSGTDIWGPGTLVTVSSGKPGSGKPGSGKPGSGKPGSDIVMTQSPSSLSASVGDRVTITCRASQSINSWLSWYQQKPGKPPKLLIYGASNLASGVPSRFKGSGSGTDFTLTISSLQPEDFATYYCQNNYGIIAAGATFGGGTKVEIKGGGGSGGGGSKTHTCPPCPAPPVAGPSVFLFPPKPKDTLMISRTPEVTCVVVDVKHEDPEVKFNWYVDGVEVHNAKTKPREEQYNSTYRVVSVLTVLHQDWLNGKEYKCKVSNKALPAPIEKTISKAKGQPREPQVYTLPPSREQMTKNQVKLTCLVKGFYPSDIAVEWESNGQPENNYKTTPPVLDSDGSFFLYSKLTVDKSRWQQGNVFSCSVMHEALHNHYTQKSLSLSPGK

SEQ ID NO: 1710 - protein, 214 aa, synthetic construct; identical to SEQ ID NO: 3
  source 1..214: note = XENP40132 Chain 3 - 1D2B4[NKG2D]_H1L1_Fab-1D2B4[NKG2D]_H1L1_Fab_(G4S)2_38E2[B7H 3]_H2_L1.1_scFv(GKPGS)4_(G4S)2-IgG1_pI(-)_Isosteric_A_PVA_/ S267K/L368D/K370S-Fc(222)_IgG1_/PVA_/S267K/S364K/E357Q

SEQ ID NO: 1711 - protein, 451 aa, synthetic construct; identical to SEQ ID NO: 11
  source 1..451: note = XENP40133 Chain 1 - 1D2B4[NKG2D]_H1L1_Fab-1D2B4[NKG2D]_H1L1_Fab_(G4S)2_38E2[B7H 3]_H2_L1.1_scFv(GKPGS)4_(G4S)2-IgG1_pI(-)_Isosteric_A_S239D /I332E/L368D/K370S-Fc(222)_IgG1_/S239D/I332E/S364K/E357Q

SEQ ID NO: 1712 - protein, 717 aa, synthetic construct
  source 1..717: note = XENP40133 Chain 2 - 1D2B4[NKG2D]_H1L1_Fab-1D2B4[NKG2D]_H1L1_Fab_(G4S)2_38E2[B7H 3]_H2_L1.1_scFv(GKPGS)4_(G4S)2-IgG1_pI(-)_Isosteric_A_S239D /I332E/L368D/K370S-Fc(222)_IgG1_/S239D/I332E/S364K/E357Q
EVQLLESGGGLVQPGGSLRLSCAASGFTFSSFGMSWVRQAPGKGLEWVSTISGSGSTTYYADSVKGRFTISRDNSKNTLYLQMNSLRAEDTAVYYCAKGVFSEWHYYFDYWGQGTLVTVSSASTKGPSVFPLAPSSKSTSGGTAALGCLVKDYFPEPVTVSWNSGALTSGVHTFPAVLQSSGLYSLSSVVTVPSSSLGTQTYICNVNHKPSNTKVDKKVEPKSCGGGGSGGGGSEVQLLESGGGLVQPGGSLRLSCAVSGFSLSSYGVIWVRQAPGKGLEYVSWVSSGGSTNYASSVKGRFTISRDTSKNTVYLQMNSLRAEDTAVYFCARGATNSGTDIWGPGTLVTVSSGKPGSGKPGSGKPGSGKPGSDIVMTQSPSSLSASVGDRVTITCRASQSINSWLSWYQQKPGKPPKLLIYGASNLASGVPSRFKGSGSGTDFTLTISSLQPEDFATYYCQNNYGIIAAGATFGGGTKVEIKGGGGSGGGGSKTHTCPPCPAPELLGGPDVFLFPPKPKDTLMISRTPEVTCVVVDVSHEDPEVKFNWYVDGVEVHNAKTKPREEQYNSTYRVVSVLTVLHQDWLNGKEYKCKVSNKALPAPEEKTISKAKGQPREPQVYTLPPSREQMTKNQVKLTCLVKGFYPSDIAVEWESNGQPENNYKTTPPVLDSDGSFFLYSKLTVDKSRWQQGNVFSCSVMHEALHNHYTQKSLSLSPGK

SEQ ID NO: 1713 - protein, 214 aa, synthetic construct; identical to SEQ ID NO: 3
  source 1..214: note = XENP40133 Chain 3 - 1D2B4[NKG2D]_H1L1_Fab-1D2B4[NKG2D]_H1L1_Fab_(G4S)2_38E2[B7H 3]_H2_L1.1_scFv(GKPGS)4_(G4S)2-IgG1_pI(-)_Isosteric_A_S239D /I332E/L368D/K370S-Fc(222)_IgG1_/S239D/I332E/S364K/E357Q

SEQ ID NO: 1714 - protein, 451 aa, synthetic construct; identical to SEQ ID NO: 9
  source 1..451: note = XENP40134 Chain 1 - 1D7B4[NKG2D]_H1L1_Fab-1D7B4[NKG2D]_H1L1_Fab_(G4S)2_38E2[B7H 3]_H2_L1.1_scFv(GKPGS)4_(G4S)2-IgG1_pI(-)_Isosteric_A_L368D /K370S-Fc(222)_IgG1_/S364K/E357Q

SEQ ID NO: 1715 - protein, 717 aa, synthetic construct
  source 1..717: note = XENP40134 Chain 2 - 1D7B4[NKG2D]_H1L1_Fab-1D7B4[NKG2D]_H1L1_Fab_(G4S)2_38E2[B7H 3]_H2_L1.1_scFv(GKPGS)4_(G4S)2-IgG1_pI(-)_Isosteric_A_L368D /K370S-Fc(222)_IgG1_/S364K/E357Q
EVQLLESGGGLVQPGGSLRLSCAASGFTFSSYAMSWVRQAPGKGLEWVSSISASGGSTYYADSVKGRFTISRDNSKNTLYLQMNSLRAEDTAVYYCAKGIFSIYFFYFDYWGQGTLVTVSSASTKGPSVFPLAPSSKSTSGGTAALGCLVKDYFPEPVTVSWNSGALTSGVHTFPAVLQSSGLYSLSSVVTVPSSSLGTQTYICNVNHKPSNTKVDKKVEPKSCGGGGSGGGGSEVQLLESGGGLVQPGGSLRLSCAVSGFSLSSYGVIWVRQAPGKGLEYVSWVSSGGSTNYASSVKGRFTISRDTSKNTVYLQMNSLRAEDTAVYFCARGATNSGTDIWGPGTLVTVSSGKPGSGKPGSGKPGSGKPGSDIVMTQSPSSLSASVGDRVTITCRASQSINSWLSWYQQKPGKPPKLLIYGASNLASGVPSRFKGSGSGTDFTLTISSLQPEDFATYYCQNNYGIIAAGATFGGGTKVEIKGGGGSGGGGSKTHTCPPCPAPELLGGPSVFLFPPKPKDTLMISRTPEVTCVVVDVSHEDPEVKFNWYVDGVEVHNAKTKPREEQYNSTYRVVSVLTVLHQDWLNGKEYKCKVSNKALPAPIEKTISKAKGQPREPQVYTLPPSREQMTKNQVKLTCLVKGFYPSDIAVEWESNGQPENNYKTTPPVLDSDGSFFLYSKLTVDKSRWQQGNVFSCSVMHEALHNHYTQKSLSLSPGK

SEQ ID NO: 1716 - protein, 214 aa, synthetic construct; identical to SEQ ID NO: 3
  source 1..214: note = XENP40134 Chain 3 - 1D7B4[NKG2D]_H1L1_Fab-1D7B4[NKG2D]_H1L1_Fab_(G4S)2_38E2[B7H 3]_H2_L1.1_scFv(GKPGS)4_(G4S)2-IgG1_pI(-)_Isosteric_A_L368D /K370S-Fc(222)_IgG1_/S364K/E357Q

SEQ ID NO: 1717 - protein, 450 aa, synthetic construct; identical to SEQ ID NO: 7
  source 1..450: note = XENP40135 Chain 1 - 1D7B4[NKG2D]_H1L1_Fab-1D7B4[NKG2D]_H1L1_Fab_(G4S)2_38E2[B7H 3]_H2_L1.1_scFv(GKPGS)4_(G4S)2-IgG1_pI(-)_Isosteric_A_PVA_/ S267K/L368D/K370S-Fc(222)_IgG1_/PVA_/S267K/S364K/E357Q

SEQ ID NO: 1718 - protein, 716 aa, synthetic construct
  source 1..716: note = XENP40135 Chain 2 - 1D7B4[NKG2D]_H1L1_Fab-1D7B4[NKG2D]_H1L1_Fab_(G4S)2_38E2[B7H 3]_H2_L1.1_scFv(GKPGS)4_(G4S)2-IgG1_pI(-)_Isosteric_A_PVA_/ S267K/L368D/K370S-Fc(222)_IgG1_/PVA_/S267K/S364K/E357Q
EVQLLESGGGLVQPGGSLRLSCAASGFTFSSYAMSWVRQAPGKGLEWVSSISASGGSTYYADSVKGRFTISRDNSKNTLYLQMNSLRAEDTAVYYCAKGIFSIYFFYFDYWGQGTLVTVSSASTKGPSVFPLAPSSKSTSGGTAALGCLVKDYFPEPVTVSWNSGALTSGVHTFPAVLQSSGLYSLSSVVTVPSSSLGTQTYICNVNHKPSNTKVDKKVEPKSCGGGGSGGGGSEVQLLESGGGLVQPGGSLRLSCAVSGFSLSSYGVIWVRQAPGKGLEYVSWVSSGGSTNYASSVKGRFTISRDTSKNTVYLQMNSLRAEDTAVYFCARGATNSGTDIWGPGTLVTVSSGKPGSGKPGSGKPGSGKPGSDIVMTQSPSSLSASVGDRVTITCRASQSINSWLSWYQQKPGKPPKLLIYGASNLASGVPSRFKGSGSGTDFTLTISSLQPEDFATYYCQNNYGIIAAGATFGGGTKVEIKGGGGSGGGGSKTHTCPPCPAPPVAGPSVFLFPPKPKDTLMISRTPEVTCVVVDVKHEDPEVKFNWYVDGVEVHNAKTKPREEQYNSTYRVVSVLTVLHQDWLNGKEYKCKVSNKALPAPIEKTISKAKGQPREPQVYTLPPSREQMTKNQVKLTCLVKGFYPSDIAVEWESNGQPENNYKTTPPVLDSDGSFFLYSKLTVDKSRWQQGNVFSCSVMHEALHNHYTQKSLSLSPGK

SEQ ID NO: 1719 - protein, 214 aa, synthetic construct; identical to SEQ ID NO: 3
  source 1..214: note = XENP40135 Chain 3 - 1D7B4[NKG2D]_H1L1_Fab-1D7B4[NKG2D]_H1L1_Fab_(G4S)2_38E2[B7H 3]_H2_L1.1_scFv(GKPGS)4_(G4S)2-IgG1_pI(-)_Isosteric_A_PVA_/ S267K/L368D/K370S-Fc(222)_IgG1_/PVA_/S267K/S364K/E357Q

SEQ ID NO: 1720 - protein, 451 aa, synthetic construct; identical to SEQ ID NO: 1
  source 1..451: note = XENP40136 Chain 1 - 1D7B4[NKG2D]_H1L1_Fab-1D7B4[NKG2D]_H1L1_Fab_(G4S)2_38E2[B7H 3]_H2_L1.1_scFv(GKPGS)4_(G4S)2-IgG1_pI(-)_Isosteric_A_S239D /I332E/L368D/K370S-Fc(222)_IgG1_/S239D/I332E/S364K/E357Q

SEQ ID NO: 1721 - protein, 717 aa, synthetic construct
  source 1..717: note = XENP40136 Chain 2 - 1D7B4[NKG2D]_H1L1_Fab-1D7B4[NKG2D]_H1L1_Fab_(G4S)2_38E2[B7H 3]_H2_L1.1_scFv(GKPGS)4_(G4S)2-IgG1_pI(-)_Isosteric_A_S239D /I332E/L368D/K370S-Fc(222)_IgG1_/S239D/I332E/S364K/E357Q
EVQLLESGGGLVQPGGSLRLSCAASGFTFSSYAMSWVRQAPGKGLEWVSSISASGGSTYYADSVKGRFTISRDNSKNTLYLQMNSLRAEDTAVYYCAKGIFSIYFFYFDYWGQGTLVTVSSASTKGPSVFPLAPSSKSTSGGTAALGCLVKDYFPEPVTVSWNSGALTSGVHTFPAVLQSSGLYSLSSVVTVPSSSLGTQTYICNVNHKPSNTKVDKKVEPKSCGGGGSGGGGSEVQLLESGGGLVQPGGSLRLSCAVSGFSLSSYGVIWVRQAPGKGLEYVSWVSSGGSTNYASSVKGRFTISRDTSKNTVYLQMNSLRAEDTAVYFCARGATNSGTDIWGPGTLVTVSSGKPGSGKPGSGKPGSGKPGSDIVMTQSPSSLSASVGDRVTITCRASQSINSWLSWYQQKPGKPPKLLIYGASNLASGVPSRFKGSGSGTDFTLTISSLQPEDFATYYCQNNYGIIAAGATFGGGTKVEIKGGGGSGGGGSKTHTCPPCPAPELLGGPDVFLFPPKPKDTLMISRTPEVTCVVVDVSHEDPEVKFNWYVDGVEVHNAKTKPREEQYNSTYRVVSVLTVLHQDWLNGKEYKCKVSNKALPAPEEKTISKAKGQPREPQVYTLPPSREQMTKNQVKLTCLVKGFYPSDIAVEWESNGQPENNYKTTPPVLDSDGSFFLYSKLTVDKSRWQQGNVFSCSVMHEALHNHYTQKSLSLSPGK

SEQ ID NO: 1722 - protein, 214 aa, synthetic construct; identical to SEQ ID NO: 3
  source 1..214: note = XENP40136 Chain 3 - 1D7B4[NKG2D]_H1L1_Fab-1D7B4[NKG2D]_H1L1_Fab_(G4S)2_38E2[B7H 3]_H2_L1.1_scFv(GKPGS)4_(G4S)2-IgG1_pI(-)_Isosteric_A_S239D /I332E/L368D/K370S-Fc(222)_IgG1_/S239D/I332E/S364K/E357Q

SEQ ID NO: 1723 - protein, 452 aa, synthetic construct; identical to SEQ ID NO: 1469
  source 1..452: note = XENP40137 Chain 1 - humON72[NKG2D]_H1L1_Fab-humON72[NKG2D]_H1L1_Fab_(G4S)2_38E2 [B7H3]_H2_L1.1_scFv(GKPGS)4_(G4S)2-IgG1_pI(-)_Isosteric_A_L 368D/K370S-Fc(222)_IgG1_/S364K/E357Q

SEQ ID NO: 1724 - protein, 718 aa, synthetic construct
  source 1..718: note = XENP40137 Chain 2 - humON72[NKG2D]_H1L1_Fab-humON72[NKG2D]_H1L1_Fab_(G4S)2_38E2 [B7H3]_H2_L1.1_scFv(GKPGS)4_(G4S)2-IgG1_pI(-)_Isosteric_A_L 368D/K370S-Fc(222)_IgG1_/S364K/E357Q
QVQLVQSGAEVKKPGASVKVSCKASGYTFTNYWMHWVRQAPGQGLEWMGEIDPSDIYTNYAQKFQGRVTMTRDTSTSTVYMELSSLRSEDTAVYYCARGIYDGYYVYGMDYWGQGTTVTVSSASTKGPSVFPLAPSSKSTSGGTAALGCLVKDYFPEPVTVSWNSGALTSGVHTFPAVLQSSGLYSLSSVVTVPSSSLGTQTYICNVNHKPSNTKVDKKVEPKSCGGGGSGGGGSEVQLLESGGGLVQPGGSLRLSCAVSGFSLSSYGVIWVRQAPGKGLEYVSWVSSGGSTNYASSVKGRFTISRDTSKNTVYLQMNSLRAEDTAVYFCARGATNSGTDIWGPGTLVTVSSGKPGSGKPGSGKPGSGKPGSDIVMTQSPSSLSASVGDRVTITCRASQSINSWLSWYQQKPGKPPKLLIYGASNLASGVPSRFKGSGSGTDFTLTISSLQPEDFATYYCQNNYGIIAAGATFGGGTKVEIKGGGGSGGGGSKTHTCPPCPAPELLGGPSVFLFPPKPKDTLMISRTPEVTCVVVDVSHEDPEVKFNWYVDGVEVHNAKTKPREEQYNSTYRVVSVLTVLHQDWLNGKEYKCKVSNKALPAPIEKTISKAKGQPREPQVYTLPPSREQMTKNQVKLTCLVKGFYPSDIAVEWESNGQPENNYKTTPPVLDSDGSFFLYSKLTVDKSRWQQGNVFSCSVMHEALHNHYTQKSLSLSPGK

SEQ ID NO: 1725 - protein, 214 aa, synthetic construct; identical to SEQ ID NO: 13
  source 1..214: note = XENP40137 Chain 3 - humON72[NKG2D]_H1L1_Fab-humON72[NKG2D]_H1L1_Fab_(G4S)2_38E2 [B7H3]_H2_L1.1_scFv(GKPGS)4_(G4S)2-IgG1_pI(-)_Isosteric_A_L 368D/K370S-Fc(222)_IgG1_/S364K/E357Q

SEQ ID NO: 1726 - protein, 451 aa, synthetic construct; identical to SEQ ID NO: 1451
  source 1..451: note = XENP40138 Chain 1 - humON72[NKG2D]_H1L1_Fab-humON72[NKG2D]_H1L1_Fab_(G4S)2_38E2 [B7H3]_H2_L1.1_scFv(GKPGS)4_(G4S)2-IgG1_pI(-)_Isosteric_A_P VA_/S267K/L368D/K370S-Fc(222)_IgG1_/PVA_/S267K/S364K/E357Q

SEQ ID NO: 1727 - protein, 717 aa, synthetic construct
  source 1..717: note = XENP40138 Chain 2 - humON72[NKG2D]_H1L1_Fab-humON72[NKG2D]_H1L1_Fab_(G4S)2_38E2 [B7H3]_H2_L1.1_scFv(GKPGS)4_(G4S)2-IgG1_pI(-)_Isosteric_A_P VA_/S267K/L368D/K370S-Fc(222)_IgG1_/PVA_/S267K/S364K/E357Q
QVQLVQSGAEVKKPGASVKVSCKASGYTFTNYWMHWVRQAPGQGLEWMGEIDPSDIYTNYAQKFQGRVTMTRDTSTSTVYMELSSLRSEDTAVYYCARGIYDGYYVYGMDYWGQGTTVTVSSASTKGPSVFPLAPSSKSTSGGTAALGCLVKDYFPEPVTVSWNSGALTSGVHTFPAVLQSSGLYSLSSVVTVPSSSLGTQTYICNVNHKPSNTKVDKKVEPKSCGGGGSGGGGSEVQLLESGGGLVQPGGSLRLSCAVSGFSLSSYGVIWVRQAPGKGLEYVSWVSSGGSTNYASSVKGRFTISRDTSKNTVYLQMNSLRAEDTAVYFCARGATNSGTDIWGPGTLVTVSSGKPGSGKPGSGKPGSGKPGSDIVMTQSPSSLSASVGDRVTITCRASQSINSWLSWYQQKPGKPPKLLIYGASNLASGVPSRFKGSGSGTDFTLTISSLQPEDFATYYCQNNYGIIAAGATFGGGTKVEIKGGGGSGGGGSKTHTCPPCPAPPVAGPSVFLFPPKPKDTLMISRTPEVTCVVVDVKHEDPEVKFNWYVDGVEVHNAKTKPREEQYNSTYRVVSVLTVLHQDWLNGKEYKCKVSNKALPAPIEKTISKAKGQPREPQVYTLPPSREQMTKNQVKLTCLVKGFYPSDIAVEWESNGQPENNYKTTPPVLDSDGSFFLYSKLTVDKSRWQQGNVFSCSVMHEALHNHYTQKSLSLSPGK

SEQ ID NO: 1728 - protein, 214 aa, synthetic construct; identical to SEQ ID NO: 13
  source 1..214: note = XENP40138 Chain 3 - humON72[NKG2D]_H1L1_Fab-humON72[NKG2D]_H1L1_Fab_(G4S)2_38E2 [B7H3]_H2_L1.1_scFv(GKPGS)4_(G4S)2-IgG1_pI(-)_Isosteric_A_P VA_/S267K/L368D/K370S-Fc(222)_IgG1_/PVA_/S267K/S364K/E357Q

SEQ ID NO: 1729 - protein, 452 aa, synthetic construct; identical to SEQ ID NO: 12
  source 1..452: note = XENP40139 Chain 1 - humON72[NKG2D]_H1L1_Fab-humON72[NKG2D]_H1L1_Fab_(G4S)2_38E2 [B7H3]_H2_L1.1_scFv(GKPGS)4_(G4S)2-IgG1_pI(-)_Isosteric_A_S 239D/I332E/L368D/K370S-Fc(222)_IgG1_/S239D/I332E/S364K/E357 Q

SEQ ID NO: 1730 - protein, 718 aa, synthetic construct
  source 1..718: note = XENP40139 Chain 2 - humON72[NKG2D]_H1L1_Fab-humON72[NKG2D]_H1L1_Fab_(G4S)2_38E2 [B7H3]_H2_L1.1_scFv(GKPGS)4_(G4S)2-IgG1_pI(-)_Isosteric_A_S 239D/I332E/L368D/K370S-Fc(222)_IgG1_/S239D/I332E/S364K/E357 Q
QVQLVQSGAEVKKPGASVKVSCKASGYTFTNYWMHWVRQAPGQGLEWMGEIDPSDIYTNYAQKFQGRVTMTRDTSTSTVYMELSSLRSEDTAVYYCARGIYDGYYVYGMDYWGQGTTVTVSSASTKGPSVFPLAPSSKSTSGGTAALGCLVKDYFPEPVTVSWNSGALTSGVHTFPAVLQSSGLYSLSSVVTVPSSSLGTQTYICNVNHKPSNTKVDKKVEPKSCGGGGSGGGGSEVQLLESGGGLVQPGGSLRLSCAVSGFSLSSYGVIWVRQAPGKGLEYVSWVSSGGSTNYASSVKGRFTISRDTSKNTVYLQMNSLRAEDTAVYFCARGATNSGTDIWGPGTLVTVSSGKPGSGKPGSGKPGSGKPGSDIVMTQSPSSLSASVGDRVTITCRASQSINSWLSWYQQKPGKPPKLLIYGASNLASGVPSRFKGSGSGTDFTLTISSLQPEDFATYYCQNNYGIIAAGATFGGGTKVEIKGGGGSGGGGSKTHTCPPCPAPELLGGPDVFLFPPKPKDTLMISRTPEVTCVVVDVSHEDPEVKFNWYVDGVEVHNAKTKPREEQYNSTYRVVSVLTVLHQDWLNGKEYKCKVSNKALPAPEEKTISKAKGQPREPQVYTLPPSREQMTKNQVKLTCLVKGFYPSDIAVEWESNGQPENNYKTTPPVLDSDGSFFLYSKLTVDKSRWQQGNVFSCSVMHEALHNHYTQKSLSLSPGK

SEQ ID NO: 1731 - protein, 214 aa, synthetic construct; identical to SEQ ID NO: 13
  source 1..214: note = XENP40139 Chain 3 - humON72[NKG2D]_H1L1_Fab-humON72[NKG2D]_H1L1_Fab_(G4S)2_38E2 [B7H3]_H2_L1.1_scFv(GKPGS)4_(G4S)2-IgG1_pI(-)_Isosteric_A_S 239D/I332E/L368D/K370S-Fc(222)_IgG1_/S239D/I332E/S364K/E357 Q

SEQ ID NO: 1732 - protein, 451 aa, synthetic construct; identical to SEQ ID NO: 1475
  source 1..451: note = XENP40143 Chain 1 - ADI27744_A44[NKG2D]_H1L1_Fab-ADI27744_A44[NKG2D]_H1L1_Fab-I gG1_pI(-)_Isosteric_A_L368D/K370S-IgG1_/S364K/E357Q/K447del _(G4S)3_38E2[B7H3]_H2_L1.1_scFv(GKPGS)4

SEQ ID NO: 1733 - protein, 712 aa, synthetic construct
  source 1..712: note = XENP40143 Chain 2 - ADI27744_A44[NKG2D]_H1L1_Fab-ADI27744_A44[NKG2D]_H1L1_Fab-I gG1_pI(-)_Isosteric_A_L368D/K370S-IgG1_/S364K/E357Q/K447del _(G4S)3_38E2[B7H3]_H2_L1.1_scFv(GKPGS)4
EVQLLESGGGLVQPGGSLRLSCAASGFTFSSYAMSWVRQAPGKGLEWVSAISGSGGSTYYADSVKGRFTISRDNSKNTLYLQMNSLRAEDTAVYYCAKDGGYYDSGAGDYWGQGTLVTVSSASTKGPSVFPLAPSSKSTSGGTAALGCLVKDYFPEPVTVSWNSGALTSGVHTFPAVLQSSGLYSLSSVVTVPSSSLGTQTYICNVNHKPSNTKVDKKVEPKSCDKTHTCPPCPAPELLGGPSVFLFPPKPKDTLMISRTPEVTCVVVDVSHEDPEVKFNWYVDGVEVHNAKTKPREEQYNSTYRVVSVLTVLHQDWLNGKEYKCKVSNKALPAPIEKTISKAKGQPREPQVYTLPPSREQMTKNQVKLTCLVKGFYPSDIAVEWESNGQPENNYKTTPPVLDSDGSFFLYSKLTVDKSRWQQGNVFSCSVMHEALHNHYTQKSLSLSPGGGGGSGGGGSGGGGSEVQLLESGGGLVQPGGSLRLSCAVSGFSLSSYGVIWVRQAPGKGLEYVSWVSSGGSTNYASSVKGRFTISRDTSKNTVYLQMNSLRAEDTAVYFCARGATNSGTDIWGPGTLVTVSSGKPGSGKPGSGKPGSGKPGSDIVMTQSPSSLSASVGDRVTITCRASQSINSWLSWYQQKPGKPPKLLIYGASNLASGVPSRFKGSGSGTDFTLTISSLQPEDFATYYCQNNYGIIAAGATFGGGTKVEIK

SEQ ID NO: 1734 - protein, 214 aa, synthetic construct; identical to SEQ ID NO: 173
  source 1..214: note = XENP40143 Chain 3 - ADI27744_A44[NKG2D]_H1L1_Fab-ADI27744_A44[NKG2D]_H1L1_Fab-I gG1_pI(-)_Isosteric_A_L368D/K370S-IgG1_/S364K/E357Q/K447del _(G4S)3_38E2[B7H3]_H2_L1.1_scFv(GKPGS)4

SEQ ID NO: 1735 - protein, 450 aa, synthetic construct; identical to SEQ ID NO: 1457
  source 1..450: note = XENP40144 Chain 1 - ADI27744_A44[NKG2D]_H1L1_Fab-ADI27744_A44[NKG2D]_H1L1_Fab-I gG1_pI(-)_Isosteric_A_PVA_/S267K/L368D/K370S-IgG1_/PVA_/S26 7K/S364K/E357Q/K447del_(G4S)3_38E2[B7H3]_H2_L1.1_scFv(GKPGS )4

SEQ ID NO: 1736 - protein, 711 aa, synthetic construct
  source 1..711: note = XENP40144 Chain 2 - ADI27744_A44[NKG2D]_H1L1_Fab-ADI27744_A44[NKG2D]_H1L1_Fab-I gG1_pI(-)_Isosteric_A_PVA_/S267K/L368D/K370S-IgG1_/PVA_/S26 7K/S364K/E357Q/K447del_(G4S)3_38E2[B7H3]_H2_L1.1_scFv(GKPGS )4
EVQLLESGGGLVQPGGSLRLSCAASGFTFSSYAMSWVRQAPGKGLEWVSAISGSGGSTYYADSVKGRFTISRDNSKNTLYLQMNSLRAEDTAVYYCAKDGGYYDSGAGDYWGQGTLVTVSSASTKGPSVFPLAPSSKSTSGGTAALGCLVKDYFPEPVTVSWNSGALTSGVHTFPAVLQSSGLYSLSSVVTVPSSSLGTQTYICNVNHKPSNTKVDKKVEPKSCDKTHTCPPCPAPPVAGPSVFLFPPKPKDTLMISRTPEVTCVVVDVKHEDPEVKFNWYVDGVEVHNAKTKPREEQYNSTYRVVSVLTVLHQDWLNGKEYKCKVSNKALPAPIEKTISKAKGQPREPQVYTLPPSREQMTKNQVKLTCLVKGFYPSDIAVEWESNGQPENNYKTTPPVLDSDGSFFLYSKLTVDKSRWQQGNVFSCSVMHEALHNHYTQKSLSLSPGGGGGSGGGGSGGGGSEVQLLESGGGLVQPGGSLRLSCAVSGFSLSSYGVIWVRQAPGKGLEYVSWVSSGGSTNYASSVKGRFTISRDTSKNTVYLQMNSLRAEDTAVYFCARGATNSGTDIWGPGTLVTVSSGKPGSGKPGSGKPGSGKPGSDIVMTQSPSSLSASVGDRVTITCRASQSINSWLSWYQQKPGKPPKLLIYGASNLASGVPSRFKGSGSGTDFTLTISSLQPEDFATYYCQNNYGIIAAGATFGGGTKVEIK

SEQ ID NO: 1737 - protein, 214 aa, synthetic construct; identical to SEQ ID NO: 173
  source 1..214: note = XENP40144 Chain 3 - ADI27744_A44[NKG2D]_H1L1_Fab-ADI27744_A44[NKG2D]_H1L1_Fab-I gG1_pI(-)_Isosteric_A_PVA_/S267K/L368D/K370S-IgG1_/PVA_/S26 7K/S364K/E357Q/K447del_(G4S)3_38E2[B7H3]_H2_L1.1_scFv(GKPGS )4

SEQ ID NO: 1738 - protein, 451 aa, synthetic construct; identical to SEQ ID NO: 172
  source 1..451: note = XENP40145 Chain 1 - ADI27744_A44[NKG2D]_H1L1_Fab-ADI27744_A44[NKG2D]_H1L1_Fab-I gG1_pI(-)_Isosteric_A_S239D/I332E/L368D/K370S-IgG1_/S239D/I 332E/S364K/E357Q/K447del_(G4S)3_38E2[B7H3]_H2_L1.1_scFv(GKP GS)4

SEQ ID NO: 1739 - protein, 712 aa, synthetic construct
  source 1..712: note = XENP40145 Chain 2 - ADI27744_A44[NKG2D]_H1L1_Fab-ADI27744_A44[NKG2D]_H1L1_Fab-I gG1_pI(-)_Isosteric_A_S239D/I332E/L368D/K370S-IgG1_/S239D/I 332E/S364K/E357Q/K447del_(G4S)3_38E2[B7H3]_H2_L1.1_scFv(GKP GS)4
EVQLLESGGGLVQPGGSLRLSCAASGFTFSSYAMSWVRQAPGKGLEWVSAISGSGGSTYYADSVKGRFTISRDNSKNTLYLQMNSLRAEDTAVYYCAKDGGYYDSGAGDYWGQGTLVTVSSASTKGPSVFPLAPSSKSTSGGTAALGCLVKDYFPEPVTVSWNSGALTSGVHTFPAVLQSSGLYSLSSVVTVPSSSLGTQTYICNVNHKPSNTKVDKKVEPKSCDKTHTCPPCPAPELLGGPDVFLFPPKPKDTLMISRTPEVTCVVVDVSHEDPEVKFNWYVDGVEVHNAKTKPREEQYNSTYRVVSVLTVLHQDWLNGKEYKCKVSNKALPAPEEKTISKAKGQPREPQVYTLPPSREQMTKNQVKLTCLVKGFYPSDIAVEWESNGQPENNYKTTPPVLDSDGSFFLYSKLTVDKSRWQQGNVFSCSVMHEALHNHYTQKSLSLSPGGGGGSGGGGSGGGGSEVQLLESGGGLVQPGGSLRLSCAVSGFSLSSYGVIWVRQAPGKGLEYVSWVSSGGSTNYASSVKGRFTISRDTSKNTVYLQMNSLRAEDTAVYFCARGATNSGTDIWGPGTLVTVSSGKPGSGKPGSGKPGSGKPGSDIVMTQSPSSLSASVGDRVTITCRASQSINSWLSWYQQKPGKPPKLLIYGASNLASGVPSRFKGSGSGTDFTLTISSLQPEDFATYYCQNNYGIIAAGATFGGGTKVEIK

SEQ ID NO: 1740 - protein, 214 aa, synthetic construct; identical to SEQ ID NO: 173
  source 1..214: note = XENP40145 Chain 3 - ADI27744_A44[NKG2D]_H1L1_Fab-ADI27744_A44[NKG2D]_H1L1_Fab-I gG1_pI(-)_Isosteric_A_S239D/I332E/L368D/K370S-IgG1_/S239D/I 332E/S364K/E357Q/K447del_(G4S)3_38E2[B7H3]_H2_L1.1_scFv(GKP GS)4

SEQ ID NO: 1741 - protein, 451 aa, synthetic construct; identical to SEQ ID NO: 1466
  source 1..451: note = XENP40146 Chain 1 - 1D2B4[NKG2D]_H1L1_Fab-1D2B4[NKG2D]_H1L1_Fab-IgG1_pI(-)_Isos teric_A_L368D/K370S-IgG1_/S364K/E357Q/K447del_(G4S)3_38E2[B 7H3]_H2_L1.1_scFv(GKPGS)4

SEQ ID NO: 1742 - protein, 712 aa, synthetic construct
  source 1..712: note = XENP40146 Chain 2 - 1D2B4[NKG2D]_H1L1_Fab-1D2B4[NKG2D]_H1L1_Fab-IgG1_pI(-)_Isos teric_A_L368D/K370S-IgG1_/S364K/E357Q/K447del_(G4S)3_38E2[B 7H3]_H2_L1.1_scFv(GKPGS)4
EVQLLESGGGLVQPGGSLRLSCAASGFTFSSFGMSWVRQAPGKGLEWVSTISGSGSTTYYADSVKGRFTISRDNSKNTLYLQMNSLRAEDTAVYYCAKGVFSEWHYYFDYWGQGTLVTVSSASTKGPSVFPLAPSSKSTSGGTAALGCLVKDYFPEPVTVSWNSGALTSGVHTFPAVLQSSGLYSLSSVVTVPSSSLGTQTYICNVNHKPSNTKVDKKVEPKSCDKTHTCPPCPAPELLGGPSVFLFPPKPKDTLMISRTPEVTCVVVDVSHEDPEVKFNWYVDGVEVHNAKTKPREEQYNSTYRVVSVLTVLHQDWLNGKEYKCKVSNKALPAPIEKTISKAKGQPREPQVYTLPPSREQMTKNQVKLTCLVKGFYPSDIAVEWESNGQPENNYKTTPPVLDSDGSFFLYSKLTVDKSRWQQGNVFSCSVMHEALHNHYTQKSLSLSPGGGGGSGGGGSGGGGSEVQLLESGGGLVQPGGSLRLSCAVSGFSLSSYGVIWVRQAPGKGLEYVSWVSSGGSTNYASSVKGRFTISRDTSKNTVYLQMNSLRAEDTAVYFCARGATNSGTDIWGPGTLVTVSSGKPGSGKPGSGKPGSGKPGSDIVMTQSPSSLSASVGDRVTITCRASQSINSWLSWYQQKPGKPPKLLIYGASNLASGVPSRFKGSGSGTDFTLTISSLQPEDFATYYCQNNYGIIAAGATFGGGTKVEIK

SEQ ID NO: 1743 - protein, 214 aa, synthetic construct; identical to SEQ ID NO: 3
  source 1..214: note = XENP40146 Chain 3 - 1D2B4[NKG2D]_H1L1_Fab-1D2B4[NKG2D]_H1L1_Fab-IgG1_pI(-)_Isos teric_A_L368D/K370S-IgG1_/S364K/E357Q/K447del_(G4S)3_38E2[B 7H3]_H2_L1.1_scFv(GKPGS)4

SEQ ID NO: 1744 - protein, 450 aa, synthetic construct; identical to SEQ ID NO: 1356
  source 1..450: note = XENP40147 Chain 1 - 1D2B4[NKG2D]_H1L1_Fab-1D2B4[NKG2D]_H1L1_Fab-IgG1_pI(-)_Isos teric_A_PVA_/S267K/L368D/K370S-IgG1_/PVA_/S267K/S364K/E357Q /K447del_(G4S)3_38E2[B7H3]_H2_L1.1_scFv(GKPGS)4

SEQ ID NO: 1745 - protein, 711 aa, synthetic construct
  source 1..711: note = XENP40147 Chain 2 - 1D2B4[NKG2D]_H1L1_Fab-1D2B4[NKG2D]_H1L1_Fab-IgG1_pI(-)_Isos teric_A_PVA_/S267K/L368D/K370S-IgG1_/PVA_/S267K/S364K/E357Q /K447del_(G4S)3_38E2[B7H3]_H2_L1.1_scFv(GKPGS)4
EVQLLESGGGLVQPGGSLRLSCAASGFTFSSFGMSWVRQAPGKGLEWVSTISGSGSTTYYADSVKGRFTISRDNSKNTLYLQMNSLRAEDTAVYYCAKGVFSEWHYYFDYWGQGTLVTVSSASTKGPSVFPLAPSSKSTSGGTAALGCLVKDYFPEPVTVSWNSGALTSGVHTFPAVLQSSGLYSLSSVVTVPSSSLGTQTYICNVNHKPSNTKVDKKVEPKSCDKTHTCPPCPAPPVAGPSVFLFPPKPKDTLMISRTPEVTCVVVDVKHEDPEVKFNWYVDGVEVHNAKTKPREEQYNSTYRVVSVLTVLHQDWLNGKEYKCKVSNKALPAPIEKTISKAKGQPREPQVYTLPPSREQMTKNQVKLTCLVKGFYPSDIAVEWESNGQPENNYKTTPPVLDSDGSFFLYSKLTVDKSRWQQGNVFSCSVMHEALHNHYTQKSLSLSPGGGGGSGGGGSGGGGSEVQLLESGGGLVQPGGSLRLSCAVSGFSLSSYGVIWVRQAPGKGLEYVSWVSSGGSTNYASSVKGRFTISRDTSKNTVYLQMNSLRAEDTAVYFCARGATNSGTDIWGPGTLVTVSSGKPGSGKPGSGKPGSGKPGSDIVMTQSPSSLSASVGDRVTITCRASQSINSWLSWYQQKPGKPPKLLIYGASNLASGVPSRFKGSGSGTDFTLTISSLQPEDFATYYCQNNYGIIAAGATFGGGTKVEIK

SEQ ID NO: 1746 - protein, 214 aa, synthetic construct; identical to SEQ ID NO: 3
  source 1..214: note = XENP40147 Chain 3 - 1D2B4[NKG2D]_H1L1_Fab-1D2B4[NKG2D]_H1L1_Fab-IgG1_pI(-)_Isos teric_A_PVA_/S267K/L368D/K370S-IgG1_/PVA_/S267K/S364K/E357Q /K447del_(G4S)3_38E2[B7H3]_H2_L1.1_scFv(GKPGS)4

SEQ ID NO: 1747 - protein, 451 aa, synthetic construct; identical to SEQ ID NO: 11
  source 1..451: note = XENP40148 Chain 1 - 1D2B4[NKG2D]_H1L1_Fab-1D2B4[NKG2D]_H1L1_Fab-IgG1_pI(-)_Isos teric_A_S239D/I332E/L368D/K370S-IgG1_/S239D/I332E/S364K/E35 7Q/K447del_(G4S)3_38E2[B7H3]_H2_L1.1_scFv(GKPGS)4

SEQ ID NO: 1748 - protein, 712 aa, synthetic construct
  source 1..712: note = XENP40148 Chain 2 - 1D2B4[NKG2D]_H1L1_Fab-1D2B4[NKG2D]_H1L1_Fab-IgG1_pI(-)_Isos teric_A_S239D/I332E/L368D/K370S-IgG1_/S239D/I332E/S364K/E35 7Q/K447del_(G4S)3_38E2[B7H3]_H2_L1.1_scFv(GKPGS)4
EVQLLESGGGLVQPGGSLRLSCAASGFTFSSFGMSWVRQAPGKGLEWVSTISGSGSTTYYADSVKGRFTISRDNSKNTLYLQMNSLRAEDTAVYYCAKGVFSEWHYYFDYWGQGTLVTVSSASTKGPSVFPLAPSSKSTSGGTAALGCLVKDYFPEPVTVSWNSGALTSGVHTFPAVLQSSGLYSLSSVVTVPSSSLGTQTYICNVNHKPSNTKVDKKVEPKSCDKTHTCPPCPAPELLGGPDVFLFPPKPKDTLMISRTPEVTCVVVDVSHEDPEVKFNWYVDGVEVHNAKTKPREEQYNSTYRVVSVLTVLHQDWLNGKEYKCKVSNKALPAPEEKTISKAKGQPREPQVYTLPPSREQMTKNQVKLTCLVKGFYPSDIAVEWESNGQPENNYKTTPPVLDSDGSFFLYSKLTVDKSRWQQGNVFSCSVMHEALHNHYTQKSLSLSPGGGGGSGGGGSGGGGSEVQLLESGGGLVQPGGSLRLSCAVSGFSLSSYGVIWVRQAPGKGLEYVSWVSSGGSTNYASSVKGRFTISRDTSKNTVYLQMNSLRAEDTAVYFCARGATNSGTDIWGPGTLVTVSSGKPGSGKPGSGKPGSGKPGSDIVMTQSPSSLSASVGDRVTITCRASQSINSWLSWYQQKPGKPPKLLIYGASNLASGVPSRFKGSGSGTDFTLTISSLQPEDFATYYCQNNYGIIAAGATFGGGTKVEIK

SEQ ID NO: 1749 - protein, 214 aa, synthetic construct; identical to SEQ ID NO: 3
  source 1..214: note = XENP40148 Chain 3 - 1D2B4[NKG2D]_H1L1_Fab-1D2B4[NKG2D]_H1L1_Fab-IgG1_pI(-)_Isos teric_A_S239D/I332E/L368D/K370S-IgG1_/S239D/I332E/S364K/E35 7Q/K447del_(G4S)3_38E2[B7H3]_H2_L1.1_scFv(GKPGS)4

SEQ ID NO: 1750 - protein, 451 aa, synthetic construct; identical to SEQ ID NO: 9
  source 1..451: note = XENP40149 Chain 1 - 1D7B4[NKG2D]_H1L1_Fab-1D7B4[NKG2D]_H1L1_Fab-IgG1_pI(-)_Isos teric_A_L368D/K370S-IgG1_/S364K/E357Q/K447del_(G4S)3_38E2[B 7H3]_H2_L1.1_scFv(GKPGS)4

SEQ ID NO: 1751 - protein, 712 aa, synthetic construct
  source 1..712: note = XENP40149 Chain 2 - 1D7B4[NKG2D]_H1L1_Fab-1D7B4[NKG2D]_H1L1_Fab-IgG1_pI(-)_Isos teric_A_L368D/K370S-IgG1_/S364K/E357Q/K447del_(G4S)3_38E2[B 7H3]_H2_L1.1_scFv(GKPGS)4
EVQLLESGGGLVQPGGSLRLSCAASGFTFSSYAMSWVRQAPGKGLEWVSSISASGGSTYYADSVKGRFTISRDNSKNTLYLQMNSLRAEDTAVYYCAKGIFSIYFFYFDYWGQGTLVTVSSASTKGPSVFPLAPSSKSTSGGTAALGCLVKDYFPEPVTVSWNSGALTSGVHTFPAVLQSSGLYSLSSVVTVPSSSLGTQTYICNVNHKPSNTKVDKKVEPKSCDKTHTCPPCPAPELLGGPSVFLFPPKPKDTLMISRTPEVTCVVVDVSHEDPEVKFNWYVDGVEVHNAKTKPREEQYNSTYRVVSVLTVLHQDWLNGKEYKCKVSNKALPAPIEKTISKAKGQPREPQVYTLPPSREQMTKNQVKLTCLVKGFYPSDIAVEWESNGQPENNYKTTPPVLDSDGSFFLYSKLTVDKSRWQQGNVFSCSVMHEALHNHYTQKSLSLSPGGGGGSGGGGSGGGGSEVQLLESGGGLVQPGGSLRLSCAVSGFSLSSYGVIWVRQAPGKGLEYVSWVSSGGSTNYASSVKGRFTISRDTSKNTVYLQMNSLRAEDTAVYFCARGATNSGTDIWGPGTLVTVSSGKPGSGKPGSGKPGSGKPGSDIVMTQSPSSLSASVGDRVTITCRASQSINSWLSWYQQKPGKPPKLLIYGASNLASGVPSRFKGSGSGTDFTLTISSLQPEDFATYYCQNNYGIIAAGATFGGGTKVEIK

SEQ ID NO: 1752 - protein, 214 aa, synthetic construct; identical to SEQ ID NO: 3
  source 1..214: note = XENP40149 Chain 3 - 1D7B4[NKG2D]_H1L1_Fab-1D7B4[NKG2D]_H1L1_Fab-IgG1_pI(-)_Isos teric_A_L368D/K370S-IgG1_/S364K/E357Q/K447del_(G4S)3_38E2[B 7H3]_H2_L1.1_scFv(GKPGS)4

SEQ ID NO: 1753 - protein, 450 aa, synthetic construct; identical to SEQ ID NO: 7
  source 1..450: note = XENP40150 Chain 1 - 1D7B4[NKG2D]_H1L1_Fab-1D7B4[NKG2D]_H1L1_Fab-IgG1_pI(-)_Isos teric_A_PVA_/S267K/L368D/K370S-IgG1_/PVA_/S267K/S364K/E357Q /K447del_(G4S)3_38E2[B7H3]_H2_L1.1_scFv(GKPGS)4

SEQ ID NO: 1754 - protein, 711 aa, synthetic construct
  source 1..711: note = XENP40150 Chain 2 - 1D7B4[NKG2D]_H1L1_Fab-1D7B4[NKG2D]_H1L1_Fab-IgG1_pI(-)_Isos teric_A_PVA_/S267K/L368D/K370S-IgG1_/PVA_/S267K/S364K/E357Q /K447del_(G4S)3_38E2[B7H3]_H2_L1.1_scFv(GKPGS)4
EVQLLESGGGLVQPGGSLRLSCAASGFTFSSYAMSWVRQAPGKGLEWVSSISASGGSTYYADSVKGRFTISRDNSKNTLYLQMNSLRAEDTAVYYCAKGIFSIYFFYFDYWGQGTLVTVSSASTKGPSVFPLAPSSKSTSGGTAALGCLVKDYFPEPVTVSWNSGALTSGVHTFPAVLQSSGLYSLSSVVTVPSSSLGTQTYICNVNHKPSNTKVDKKVEPKSCDKTHTCPPCPAPPVAGPSVFLFPPKPKDTLMISRTPEVTCVVVDVKHEDPEVKFNWYVDGVEVHNAKTKPREEQYNSTYRVVSVLTVLHQDWLNGKEYKCKVSNKALPAPIEKTISKAKGQPREPQVYTLPPSREQMTKNQVKLTCLVKGFYPSDIAVEWESNGQPENNYKTTPPVLDSDGSFFLYSKLTVDKSRWQQGNVFSCSVMHEALHNHYTQKSLSLSPGGGGGSGGGGSGGGGSEVQLLESGGGLVQPGGSLRLSCAVSGFSLSSYGVIWVRQAPGKGLEYVSWVSSGGSTNYASSVKGRFTISRDTSKNTVYLQMNSLRAEDTAVYFCARGATNSGTDIWGPGTLVTVSSGKPGSGKPGSGKPGSGKPGSDIVMTQSPSSLSASVGDRVTITCRASQSINSWLSWYQQKPGKPPKLLIYGASNLASGVPSRFKGSGSGTDFTLTISSLQPEDFATYYCQNNYGIIAAGATFGGGTKVEIK

SEQ ID NO: 1755 - protein, 214 aa, synthetic construct; identical to SEQ ID NO: 3
  source 1..214: note = XENP40150 Chain 3 - 1D7B4[NKG2D]_H1L1_Fab-1D7B4[NKG2D]_H1L1_Fab-IgG1_pI(-)_Isos teric_A_PVA_/S267K/L368D/K370S-IgG1_/PVA_/S267K/S364K/E357Q /K447del_(G4S)3_38E2[B7H3]_H2_L1.1_scFv(GKPGS)4

SEQ ID NO: 1756 - protein, 451 aa, synthetic construct; identical to SEQ ID NO: 1
  source 1..451: note = XENP40151 Chain 1 - 1D7B4[NKG2D]_H1L1_Fab-1D7B4[NKG2D]_H1L1_Fab-IgG1_pI(-)_Isos teric_A_S239D/I332E/L368D/K370S-IgG1_/S239D/I332E/S364K/E35 7Q/K447del_(G4S)3_38E2[B7H3]_H2_L1.1_scFv(GKPGS)4

SEQ ID NO: 1757 - protein, 712 aa, synthetic construct
  source 1..712: note = XENP40151 Chain 2 - 1D7B4[NKG2D]_H1L1_Fab-1D7B4[NKG2D]_H1L1_Fab-IgG1_pI(-)_Isos teric_A_S239D/I332E/L368D/K370S-IgG1_/S239D/I332E/S364K/E35 7Q/K447del_(G4S)3_38E2[B7H3]_H2_L1.1_scFv(GKPGS)4
EVQLLESGGGLVQPGGSLRLSCAASGFTFSSYAMSWVRQAPGKGLEWVSSISASGGSTYYADSVKGRFTISRDNSKNTLYLQMNSLRAEDTAVYYCAKGIFSIYFFYFDYWGQGTLVTVSSASTKGPSVFPLAPSSKSTSGGTAALGCLVKDYFPEPVTVSWNSGALTSGVHTFPAVLQSSGLYSLSSVVTVPSSSLGTQTYICNVNHKPSNTKVDKKVEPKSCDKTHTCPPCPAPELLGGPDVFLFPPKPKDTLMISRTPEVTCVVVDVSHEDPEVKFNWYVDGVEVHNAKTKPREEQYNSTYRVVSVLTVLHQDWLNGKEYKCKVSNKALPAPEEKTISKAKGQPREPQVYTLPPSREQMTKNQVKLTCLVKGFYPSDIAVEWESNGQPENNYKTTPPVLDSDGSFFLYSKLTVDKSRWQQGNVFSCSVMHEALHNHYTQKSLSLSPGGGGGSGGGGSGGGGSEVQLLESGGGLVQPGGSLRLSCAVSGFSLSSYGVIWVRQAPGKGLEYVSWVSSGGSTNYASSVKGRFTISRDTSKNTVYLQMNSLRAEDTAVYFCARGATNSGTDIWGPGTLVTVSSGKPGSGKPGSGKPGSGKPGSDIVMTQSPSSLSASVGDRVTITCRASQSINSWLSWYQQKPGKPPKLLIYGASNLASGVPSRFKGSGSGTDFTLTISSLQPEDFATYYCQNNYGIIAAGATFGGGTKVEIK

SEQ ID NO: 1758 - protein, 214 aa, synthetic construct; identical to SEQ ID NO: 3
  source 1..214: note = XENP40151 Chain 3 - 1D7B4[NKG2D]_H1L1_Fab-1D7B4[NKG2D]_H1L1_Fab-IgG1_pI(-)_Isos teric_A_S239D/I332E/L368D/K370S-IgG1_/S239D/I332E/S364K/E35 7Q/K447del_(G4S)3_38E2[B7H3]_H2_L1.1_scFv(GKPGS)4

SEQ ID NO: 1759 - protein, 452 aa, synthetic construct; identical to SEQ ID NO: 1469
  source 1..452: note = XENP40152 Chain 1 - humON72[NKG2D]_H1L1_Fab-humON72[NKG2D]_H1L1_Fab-IgG1_pI(-)_ Isosteric_A_L368D/K370S-IgG1_/S364K/E357Q/K447del_(G4S)3_38 E2[B7H3]_H2_L1.1_scFv(GKPGS)4

SEQ ID NO: 1760 - protein, 713 aa, synthetic construct
  source 1..713: note = XENP40152 Chain 2 - humON72[NKG2D]_H1L1_Fab-humON72[NKG2D]_H1L1_Fab-IgG1_pI(-)_ Isosteric_A_L368D/K370S-IgG1_/S364K/E357Q/K447del_(G4S)3_38 E2[B7H3]_H2_L1.1_scFv(GKPGS)4
QVQLVQSGAEVKKPGASVKVSCKASGYTFTNYWMHWVRQAPGQGLEWMGEIDPSDIYTNYAQKFQGRVTMTRDTSTSTVYMELSSLRSEDTAVYYCARGIYDGYYVYGMDYWGQGTTVTVSSASTKGPSVFPLAPSSKSTSGGTAALGCLVKDYFPEPVTVSWNSGALTSGVHTFPAVLQSSGLYSLSSVVTVPSSSLGTQTYICNVNHKPSNTKVDKKVEPKSCDKTHTCPPCPAPELLGGPSVFLFPPKPKDTLMISRTPEVTCVVVDVSHEDPEVKFNWYVDGVEVHNAKTKPREEQYNSTYRVVSVLTVLHQDWLNGKEYKCKVSNKALPAPIEKTISKAKGQPREPQVYTLPPSREQMTKNQVKLTCLVKGFYPSDIAVEWESNGQPENNYKTTPPVLDSDGSFFLYSKLTVDKSRWQQGNVFSCSVMHEALHNHYTQKSLSLSPGGGGGSGGGGSGGGGSEVQLLESGGGLVQPGGSLRLSCAVSGFSLSSYGVIWVRQAPGKGLEYVSWVSSGGSTNYASSVKGRFTISRDTSKNTVYLQMNSLRAEDTAVYFCARGATNSGTDIWGPGTLVTVSSGKPGSGKPGSGKPGSGKPGSDIVMTQSPSSLSASVGDRVTITCRASQSINSWLSWYQQKPGKPPKLLIYGASNLASGVPSRFKGSGSGTDFTLTISSLQPEDFATYYCQNNYGIIAAGATFGGGTKVEIK

SEQ ID NO: 1761 - protein, 214 aa, synthetic construct; identical to SEQ ID NO: 13
  source 1..214: note = XENP40152 Chain 3 - humON72[NKG2D]_H1L1_Fab-humON72[NKG2D]_H1L1_Fab-IgG1_pI(-)_ Isosteric_A_L368D/K370S-IgG1_/S364K/E357Q/K447del_(G4S)3_38 E2[B7H3]_H2_L1.1_scFv(GKPGS)4

SEQ ID NO: 1762 - protein, 451 aa, synthetic construct; identical to SEQ ID NO: 1451
  source 1..451: note = XENP40153 Chain 1 - humON72[NKG2D]_H1L1_Fab-humON72[NKG2D]_H1L1_Fab-IgG1_pI(-)_ Isosteric_A_PVA_/S267K/L368D/K370S-IgG1_/PVA_/S267K/S364K/E 357Q/K447del_(G4S)3_38E2[B7H3]_H2_L1.1_scFv(GKPGS)4

SEQ ID NO: 1763 - protein, 712 aa, synthetic construct
  source 1..712: note = XENP40153 Chain 2 - humON72[NKG2D]_H1L1_Fab-humON72[NKG2D]_H1L1_Fab-IgG1_pI(-)_ Isosteric_A_PVA_/S267K/L368D/K370S-IgG1_/PVA_/S267K/S364K/E 357Q/K447del_(G4S)3_38E2[B7H3]_H2_L1.1_scFv(GKPGS)4
QVQLVQSGAEVKKPGASVKVSCKASGYTFTNYWMHWVRQAPGQGLEWMGEIDPSDIYTNYAQKFQGRVTMTRDTSTSTVYMELSSLRSEDTAVYYCARGIYDGYYVYGMDYWGQGTTVTVSSASTKGPSVFPLAPSSKSTSGGTAALGCLVKDYFPEPVTVSWNSGALTSGVHTFPAVLQSSGLYSLSSVVTVPSSSLGTQTYICNVNHKPSNTKVDKKVEPKSCDKTHTCPPCPAPPVAGPSVFLFPPKPKDTLMISRTPEVTCVVVDVKHEDPEVKFNWYVDGVEVHNAKTKPREEQYNSTYRVVSVLTVLHQDWLNGKEYKCKVSNKALPAPIEKTISKAKGQPREPQVYTLPPSREQMTKNQVKLTCLVKGFYPSDIAVEWESNGQPENNYKTTPPVLDSDGSFFLYSKLTVDKSRWQQGNVFSCSVMHEALHNHYTQKSLSLSPGGGGGSGGGGSGGGGSEVQLLESGGGLVQPGGSLRLSCAVSGFSLSSYGVIWVRQAPGKGLEYVSWVSSGGSTNYASSVKGRFTISRDTSKNTVYLQMNSLRAEDTAVYFCARGATNSGTDIWGPGTLVTVSSGKPGSGKPGSGKPGSGKPGSDIVMTQSPSSLSASVGDRVTITCRASQSINSWLSWYQQKPGKPPKLLIYGASNLASGVPSRFKGSGSGTDFTLTISSLQPEDFATYYCQNNYGIIAAGATFGGGTKVEIK

SEQ ID NO: 1764 - protein, 214 aa, synthetic construct; identical to SEQ ID NO: 13
  source 1..214: note = XENP40153 Chain 3 - humON72[NKG2D]_H1L1_Fab-humON72[NKG2D]_H1L1_Fab-IgG1_pI(-)_ Isosteric_A_PVA_/S267K/L368D/K370S-IgG1_/PVA_/S267K/S364K/E 357Q/K447del_(G4S)3_38E2[B7H3]_H2_L1.1_scFv(GKPGS)4

SEQ ID NO: 1765 - protein, 452 aa, synthetic construct; identical to SEQ ID NO: 12
  source 1..452: note = XENP40154 Chain 1 - humON72[NKG2D]_H1L1_Fab-humON72[NKG2D]_H1L1_Fab-IgG1_pI(-)_ Isosteric_A_S239D/I332E/L368D/K370S-IgG1_/S239D/I332E/S364K /E357Q/K447del_(G4S)3_38E2[B7H3]_H2_L1.1_scFv(GKPGS)4

SEQ ID NO: 1766 - protein, 713 aa, synthetic construct
  source 1..713: note = XENP40154 Chain 2 - humON72[NKG2D]_H1L1_Fab-humON72[NKG2D]_H1L1_Fab-IgG1_pI(-)_ Isosteric_A_S239D/I332E/L368D/K370S-IgG1_/S239D/I332E/S364K /E357Q/K447del_(G4S)3_38E2[B7H3]_H2_L1.1_scFv(GKPGS)4
QVQLVQSGAEVKKPGASVKVSCKASGYTFTNYWMHWVRQAPGQGLEWMGEIDPSDIYTNYAQKFQGRVTMTRDTSTSTVYMELSSLRSEDTAVYYCARGIYDGYYVYGMDYWGQGTTVTVSSASTKGPSVFPLAPSSKSTSGGTAALGCLVKDYFPEPVTVSWNSGALTSGVHTFPAVLQSSGLYSLSSVVTVPSSSLGTQTYICNVNHKPSNTKVDKKVEPKSCDKTHTCPPCPAPELLGGPDVFLFPPKPKDTLMISRTPEVTCVVVDVSHEDPEVKFNWYVDGVEVHNAKTKPREEQYNSTYRVVSVLTVLHQDWLNGKEYKCKVSNKALPAPEEKTISKAKGQPREPQVYTLPPSREQMTKNQVKLTCLVKGFYPSDIAVEWESNGQPENNYKTTPPVLDSDGSFFLYSKLTVDKSRWQQGNVFSCSVMHEALHNHYTQKSLSLSPGGGGGSGGGGSGGGGSEVQLLESGGGLVQPGGSLRLSCAVSGFSLSSYGVIWVRQAPGKGLEYVSWVSSGGSTNYASSVKGRFTISRDTSKNTVYLQMNSLRAEDTAVYFCARGATNSGTDIWGPGTLVTVSSGKPGSGKPGSGKPGSGKPGSDIVMTQSPSSLSASVGDRVTITCRASQSINSWLSWYQQKPGKPPKLLIYGASNLASGVPSRFKGSGSGTDFTLTISSLQPEDFATYYCQNNYGIIAAGATFGGGTKVEIK

SEQ ID NO: 1767 - protein, 214 aa, synthetic construct; identical to SEQ ID NO: 13
  source 1..214: note = XENP40154 Chain 3 - humON72[NKG2D]_H1L1_Fab-humON72[NKG2D]_H1L1_Fab-IgG1_pI(-)_ Isosteric_A_S239D/I332E/L368D/K370S-IgG1_/S239D/I332E/S364K /E357Q/K447del_(G4S)3_38E2[B7H3]_H2_L1.1_scFv(GKPGS)4

SEQ ID NO: 1768 - protein, 446 aa, synthetic construct; identical to SEQ ID NO: 1038
  source 1..446: note = XENP40373 Chain 1 - 38E2[B7H3]_H2_L1.1_Fab-1D2B4[NKG2D]_H1L1_scFv(GKPGS)4-IgG1_ pI(-)_Isosteric_A_PVA_/S267K/L368D/K370S-Fc(216)_IgG1_C220S /PVA_/S267K/S364K/E357Q

SEQ ID NO: 1769 - protein, 479 aa, synthetic construct
  source 1..479: note = XENP40373 Chain 2 - 38E2[B7H3]_H2_L1.1_Fab-1D2B4[NKG2D]_H1L1_scFv(GKPGS)4-IgG1_ pI(-)_Isosteric_A_PVA_/S267K/L368D/K370S-Fc(216)_IgG1_C220S /PVA_/S267K/S364K/E357Q
EVQLLESGGGLVQPGGSLRLSCAASGFTFSSFGMSWVRQAPGKGLEWVSTISGSGSTTYYADSVKGRFTISRDNSKNTLYLQMNSLRAEDTAVYYCAKGVFSEWHYYFDYWGQGTLVTVSSGKPGSGKPGSGKPGSGKPGSDIQMTQSPSSLSASVGDRVTITCRASQSISSYLNWYQQKPGKAPKLLIYAASSLQSGVPSRFSGSGSGTDFTLTISSLQPEDFATYYCQQSYSTPYTFGQGTKLEIKEPKSSDKTHTCPPCPAPPVAGPSVFLFPPKPKDTLMISRTPEVTCVVVDVKHEDPEVKFNWYVDGVEVHNAKTKPREEQYNSTYRVVSVLTVLHQDWLNGKEYKCKVSNKALPAPIEKTISKAKGQPREPQVYTLPPSREQMTKNQVKLTCLVKGFYPSDIAVEWESNGQPENNYKTTPPVLDSDGSFFLYSKLTVDKSRWQQGNVFSCSVMHEALHNHYTQKSLSLSPGK

SEQ ID NO: 1770 - protein, 217 aa, synthetic construct; identical to SEQ ID NO: 6
  source 1..217: note = XENP40373 Chain 3 - 38E2[B7H3]_H2_L1.1_Fab-1D2B4[NKG2D]_H1L1_scFv(GKPGS)4-IgG1_ pI(-)_Isosteric_A_PVA_/S267K/L368D/K370S-Fc(216)_IgG1_C220S /PVA_/S267K/S364K/E357Q

SEQ ID NO: 1771 - protein, 447 aa, synthetic construct; identical to SEQ ID NO: 988
  source 1..447: note = XENP40378 Chain 1 - 38E2[B7H3]_H2_L1.1_Fab-humON72[NKG2D]_H1L1_scFv(GKPGS)4-IgG 1_pI(-)_Isosteric_A_L368D/K370S-Fc(216)_IgG1_C220S/S364K/E3 57Q

SEQ ID NO: 1772 - protein, 481 aa, synthetic construct
  source 1..481: note = XENP40378 Chain 2 - 38E2[B7H3]_H2_L1.1_Fab-humON72[NKG2D]_H1L1_scFv(GKPGS)4-IgG 1_pI(-)_Isosteric_A_L368D/K370S-Fc(216)_IgG1_C220S/S364K/E3 57Q
QVQLVQSGAEVKKPGASVKVSCKASGYTFTNYWMHWVRQAPGQGLEWMGEIDPSDIYTNYAQKFQGRVTMTRDTSTSTVYMELSSLRSEDTAVYYCARGIYDGYYVYGMDYWGQGTTVTVSSGKPGSGKPGSGKPGSGKPGSYIQMTQSPSSLSASVGDRVTITCRSSQDISNYLNWYQQKPGKAPKLLIYYTSRLHSGVPSRFSGSGSGTDFTFTISSLQPEDIATYYCQQGKTLPRTFGGGTKVEIKEPKSSDKTHTCPPCPAPELLGGPSVFLFPPKPKDTLMISRTPEVTCVVVDVSHEDPEVKFNWYVDGVEVHNAKTKPREEQYNSTYRVVSVLTVLHQDWLNGKEYKCKVSNKALPAPIEKTISKAKGQPREPQVYTLPPSREQMTKNQVKLTCLVKGFYPSDIAVEWESNGQPENNYKTTPPVLDSDGSFFLYSKLTVDKSRWQQGNVFSCSVMHEALHNHYTQKSLSLSPGK

SEQ ID NO: 1773 - protein, 217 aa, synthetic construct; identical to SEQ ID NO: 6
  source 1..217: note = XENP40378 Chain 3 - 38E2[B7H3]_H2_L1.1_Fab-humON72[NKG2D]_H1L1_scFv(GKPGS)4-IgG 1_pI(-)_Isosteric_A_L368D/K370S-Fc(216)_IgG1_C220S/S364K/E3 57Q

SEQ ID NO: 1774 - protein, 446 aa, synthetic construct; identical to SEQ ID NO: 1038
  source 1..446: note = XENP40379 Chain 1 - 38E2[B7H3]_H2_L1.1_Fab-humON72[NKG2D]_H1L1_scFv(GKPGS)4-IgG 1_pI(-)_Isosteric_A_PVA_/S267K/L368D/K370S-Fc(216)_IgG1_C22 0S/PVA_/S267K/S364K/E357Q

SEQ ID NO: 1775 - protein, 480 aa, synthetic construct
  source 1..480: note = XENP40379 Chain 2 - 38E2[B7H3]_H2_L1.1_Fab-humON72[NKG2D]_H1L1_scFv(GKPGS)4-IgG 1_pI(-)_Isosteric_A_PVA_/S267K/L368D/K370S-Fc(216)_IgG1_C22 0S/PVA_/S267K/S364K/E357Q
QVQLVQSGAEVKKPGASVKVSCKASGYTFTNYWMHWVRQAPGQGLEWMGEIDPSDIYTNYAQKFQGRVTMTRDTSTSTVYMELSSLRSEDTAVYYCARGIYDGYYVYGMDYWGQGTTVTVSSGKPGSGKPGSGKPGSGKPGSYIQMTQSPSSLSASVGDRVTITCRSSQDISNYLNWYQQKPGKAPKLLIYYTSRLHSGVPSRFSGSGSGTDFTFTISSLQPEDIATYYCQQGKTLPRTFGGGTKVEIKEPKSSDKTHTCPPCPAPPVAGPSVFLFPPKPKDTLMISRTPEVTCVVVDVKHEDPEVKFNWYVDGVEVHNAKTKPREEQYNSTYRVVSVLTVLHQDWLNGKEYKCKVSNKALPAPIEKTISKAKGQPREPQVYTLPPSREQMTKNQVKLTCLVKGFYPSDIAVEWESNGQPENNYKTTPPVLDSDGSFFLYSKLTVDKSRWQQGNVFSCSVMHEALHNHYTQKSLSLSPGK

SEQ ID NO: 1776 - protein, 12 aa, synthetic construct
  source 1..12: note = 1D7B4[NKG2D]_H1.33 - vhCDR3
GIFSIEFFYFDY

SEQ ID NO: 1777 - protein, 447 aa, synthetic construct; identical to SEQ ID NO: 4
  source 1..447: note = XENP40380 Chain 1 - 38E2[B7H3]_H2_L1.1_Fab-humON72[NKG2D]_H1L1_scFv(GKPGS)4-IgG 1_pI(-)_Isosteric_A_S239D/I332E/L368D/K370S-Fc(216)_IgG1_C2 20S/S239D/I332E/S364K/E357Q

SEQ ID NO: 1778 - protein, 481 aa, synthetic construct
  source 1..481: note = XENP40380 Chain 2 - 38E2[B7H3]_H2_L1.1_Fab-humON72[NKG2D]_H1L1_scFv(GKPGS)4-IgG 1_pI(-)_Isosteric_A_S239D/I332E/L368D/K370S-Fc(216)_IgG1_C2 20S/S239D/I332E/S364K/E357Q
QVQLVQSGAEVKKPGASVKVSCKASGYTFTNYWMHWVRQAPGQGLEWMGEIDPSDIYTNYAQKFQGRVTMTRDTSTSTVYMELSSLRSEDTAVYYCARGIYDGYYVYGMDYWGQGTTVTVSSGKPGSGKPGSGKPGSGKPGSYIQMTQSPSSLSASVGDRVTITCRSSQDISNYLNWYQQKPGKAPKLLIYYTSRLHSGVPSRFSGSGSGTDFTFTISSLQPEDIATYYCQQGKTLPRTFGGGTKVEIKEPKSSDKTHTCPPCPAPELLGGPDVFLFPPKPKDTLMISRTPEVTCVVVDVSHEDPEVKFNWYVDGVEVHNAKTKPREEQYNSTYRVVSVLTVLHQDWLNGKEYKCKVSNKALPAPEEKTISKAKGQPREPQVYTLPPSREQMTKNQVKLTCLVKGFYPSDIAVEWESNGQPENNYKTTPPVLDSDGSFFLYSKLTVDKSRWQQGNVFSCSVMHEALHNHYTQKSLSLSPGK

SEQ ID NO: 1779 - protein, 217 aa, synthetic construct; identical to SEQ ID NO: 6
  source 1..217: note = XENP40380 Chain 3 - 38E2[B7H3]_H2_L1.1_Fab-humON72[NKG2D]_H1L1_scFv(GKPGS)4-IgG 1_pI(-)_Isosteric_A_S239D/I332E/L368D/K370S-Fc(216)_IgG1_C2 20S/S239D/I332E/S364K/E357Q

SEQ ID NO: 1780 - protein, 446 aa, synthetic construct; identical to SEQ ID NO: 1038
  source 1..446: note = XENP40382 Chain 1 - 38E2[B7H3]_H2_L1.1_Fab-ADI27744_A44[NKG2D]_H0L0_scFv(GKPGS) 4-IgG1_pI(-)_Isosteric_A_PVA_/S267K/L368D/K370S-Fc(216)_IgG 1_C220S/PVA_/S267K/S364K/E357Q

SEQ ID NO: 1781 - protein, 479 aa, synthetic construct
  source 1..479: note = XENP40382 Chain 2 - 38E2[B7H3]_H2_L1.1_Fab-ADI27744_A44[NKG2D]_H0L0_scFv(GKPGS) 4-IgG1_pI(-)_Isosteric_A_PVA_/S267K/L368D/K370S-Fc(216)_IgG 1_C220S/PVA_/S267K/S364K/E357Q
EVQLLESGGGLVQPGGSLRLSCAASGFTFSSYAMSWVRQAPGKGLEWVSAISGSGGSTYYADSVKGRFTISRDNSKNTLYLQMNSLRAEDTAVYYCAKDGGYYDSGAGDYWGQGTLVTVSSGKPGSGKPGSGKPGSGKPGSDIQMTQSPSSVSASVGDRVTITCRASQGIDSWLAWYQQKPGKAPKLLIYAASSLQSGVPSRFSGSGSGTDFTLTISSLQPEDFATYYCQQGVSYPRTFGGGTKVEIKEPKSSDKTHTCPPCPAPPVAGPSVFLFPPKPKDTLMISRTPEVTCVVVDVKHEDPEVKFNWYVDGVEVHNAKTKPREEQYNSTYRVVSVLTVLHQDWLNGKEYKCKVSNKALPAPIEKTISKAKGQPREPQVYTLPPSREQMTKNQVKLTCLVKGFYPSDIAVEWESNGQPENNYKTTPPVLDSDGSFFLYSKLTVDKSRWQQGNVFSCSVMHEALHNHYTQKSLSLSPGK

SEQ ID NO: 1782 - protein, 217 aa, synthetic construct; identical to SEQ ID NO: 6
  source 1..217: note = XENP40382 Chain 3 - 38E2[B7H3]_H2_L1.1_Fab-ADI27744_A44[NKG2D]_H0L0_scFv(GKPGS) 4-IgG1_pI(-)_Isosteric_A_PVA_/S267K/L368D/K370S-Fc(216)_IgG 1_C220S/PVA_/S267K/S364K/E357Q

SEQ ID NO: 1783 - protein, 447 aa, synthetic construct; identical to SEQ ID NO: 4
  source 1..447: note = XENP40383 Chain 1 - 38E2[B7H3]_H2_L1.1_Fab-ADI27744_A44[NKG2D]_H0L0_scFv(GKPGS) 4-IgG1_pI(-)_Isosteric_A_S239D/I332E/L368D/K370S-Fc(216)_Ig G1_C220S/S239D/I332E/S364K/E357Q

SEQ ID NO: 1784 - protein, 480 aa, synthetic construct
  source 1..480: note = XENP40383 Chain 2 - 38E2[B7H3]_H2_L1.1_Fab-ADI27744_A44[NKG2D]_H0L0_scFv(GKPGS) 4-IgG1_pI(-)_Isosteric_A_S239D/I332E/L368D/K370S-Fc(216)_Ig G1_C220S/S239D/I332E/S364K/E357Q
EVQLLESGGGLVQPGGSLRLSCAASGFTFSSYAMSWVRQAPGKGLEWVSAISGSGGSTYYADSVKGRFTISRDNSKNTLYLQMNSLRAEDTAVYYCAKDGGYYDSGAGDYWGQGTLVTVSSGKPGSGKPGSGKPGSGKPGSDIQMTQSPSSVSASVGDRVTITCRASQGIDSWLAWYQQKPGKAPKLLIYAASSLQSGVPSRFSGSGSGTDFTLTISSLQPEDFATYYCQQGVSYPRTFGGGTKVEIKEPKSSDKTHTCPPCPAPELLGGPDVFLFPPKPKDTLMISRTPEVTCVVVDVSHEDPEVKFNWYVDGVEVHNAKTKPREEQYNSTYRVVSVLTVLHQDWLNGKEYKCKVSNKALPAPEEKTISKAKGQPREPQVYTLPPSREQMTKNQVKLTCLVKGFYPSDIAVEWESNGQPENNYKTTPPVLDSDGSFFLYSKLTVDKSRWQQGNVFSCSVMHEALHNHYTQKSLSLSPGK

SEQ ID NO: 1785 - protein, 217 aa, synthetic construct; identical to SEQ ID NO: 6
  source 1..217: note = XENP40383 Chain 3 - 38E2[B7H3]_H2_L1.1_Fab-ADI27744_A44[NKG2D]_H0L0_scFv(GKPGS) 4-IgG1_pI(-)_Isosteric_A_S239D/I332E/L368D/K370S-Fc(216)_Ig G1_C220S/S239D/I332E/S364K/E357Q

SEQ ID NO: 1786 - protein, 446 aa, synthetic construct; identical to SEQ ID NO: 1038
  source 1..446: note = XENP40458 Chain 1 - 38E2[B7H3]_H2_L1.1_Fab-ADI27749_A49[NKG2D]_H0L0_scFv(GKPGS) 4-IgG1_pI(-)_Isosteric_A_PVA_/S267K/L368D/K370S-Fc(216)_IgG 1_C220S/PVA_/S267K/S364K/E357Q

SEQ ID NO: 1787 - protein, 480 aa, synthetic construct
  source 1..480: note = XENP40458 Chain 2 - 38E2[B7H3]_H2_L1.1_Fab-ADI27749_A49[NKG2D]_H0L0_scFv(GKPGS) 4-IgG1_pI(-)_Isosteric_A_PVA_/S267K/L368D/K370S-Fc(216)_IgG 1_C220S/PVA_/S267K/S364K/E357Q
EVQLVESGGGLVKPGGSLRLSCAASGFTFSSYSMNWVRQAPGKGLEWVSSISSSSSYIYYADSVKGRFTISRDNAKNSLYLQMNSLRAEDTAVYYCARGAPMGAAAGWFDPWGQGTLVTVSSGKPGSGKPGSGKPGSGKPGSDIQMTQSPSSVSASVGDRVTITCRASQGISSWLAWYQQKPGKAPKLLIYAASSLQSGVPSRFSGSGSGTDFTLTISSLQPEDFATYYCQQGVSFPRTFGGGTKVEIKEPKSSDKTHTCPPCPAPPVAGPSVFLFPPKPKDTLMISRTPEVTCVVVDVKHEDPEVKFNWYVDGVEVHNAKTKPREEQYNSTYRVVSVLTVLHQDWLNGKEYKCKVSNKALPAPIEKTISKAKGQPREPQVYTLPPSREQMTKNQVKLTCLVKGFYPSDIAVEWESNGQPENNYKTTPPVLDSDGSFFLYSKLTVDKSRWQQGNVFSCSVMHEALHNHYTQKSLSLSPGK

SEQ ID NO: 1788 - protein, 217 aa, synthetic construct; identical to SEQ ID NO: 6
  source 1..217: note = XENP40458 Chain 3 - 38E2[B7H3]_H2_L1.1_Fab-ADI27749_A49[NKG2D]_H0L0_scFv(GKPGS) 4-IgG1_pI(-)_Isosteric_A_PVA_/S267K/L368D/K370S-Fc(216)_IgG 1_C220S/PVA_/S267K/S364K/E357Q

SEQ ID NO: 1789 - protein, 447 aa, synthetic construct; identical to SEQ ID NO: 4
  source 1..447: note = XENP40459 Chain 1 - 38E2[B7H3]_H2_L1.1_Fab-ADI27749_A49[NKG2D]_H0L0_scFv(GKPGS) 4-IgG1_pI(-)_Isosteric_A_S239D/I332E/L368D/K370S-Fc(216)_Ig G1_C220S/S239D/I332E/S364K/E357Q

SEQ ID NO: 1790 - protein, 481 aa, synthetic construct
  source 1..481: note = XENP40459 Chain 2 - 38E2[B7H3]_H2_L1.1_Fab-ADI27749_A49[NKG2D]_H0L0_scFv(GKPGS) 4-IgG1_pI(-)_Isosteric_A_S239D/I332E/L368D/K370S-Fc(216)_Ig G1_C220S/S239D/I332E/S364K/E357Q
EVQLVESGGGLVKPGGSLRLSCAASGFTFSSYSMNWVRQAPGKGLEWVSSISSSSSYIYYADSVKGRFTISRDNAKNSLYLQMNSLRAEDTAVYYCARGAPMGAAAGWFDPWGQGTLVTVSSGKPGSGKPGSGKPGSGKPGSDIQMTQSPSSVSASVGDRVTITCRASQGISSWLAWYQQKPGKAPKLLIYAASSLQSGVPSRFSGSGSGTDFTLTISSLQPEDFATYYCQQGVSFPRTFGGGTKVEIKEPKSSDKTHTCPPCPAPELLGGPDVFLFPPKPKDTLMISRTPEVTCVVVDVSHEDPEVKFNWYVDGVEVHNAKTKPREEQYNSTYRVVSVLTVLHQDWLNGKEYKCKVSNKALPAPEEKTISKAKGQPREPQVYTLPPSREQMTKNQVKLTCLVKGFYPSDIAVEWESNGQPENNYKTTPPVLDSDGSFFLYSKLTVDKSRWQQGNVFSCSVMHEALHNHYTQKSLSLSPGK

SEQ ID NO: 1791 - protein, 217 aa, synthetic construct; identical to SEQ ID NO: 6
  source 1..217: note = XENP40459 Chain 3 - 38E2[B7H3]_H2_L1.1_Fab-ADI27749_A49[NKG2D]_H0L0_scFv(GKPGS) 4-IgG1_pI(-)_Isosteric_A_S239D/I332E/L368D/K370S-Fc(216)_Ig G1_C220S/S239D/I332E/S364K/E357Q

SEQ ID NO: 1792 - protein, 231 aa, synthetic construct
  source 1..231: note = XENP40480 Chain 1 - empty_Fc-1D2B4[NKG2D]_H1L1_scFv(GKPGS)4-Fc(216)_IgG1_pI(-)_ Isosteric_A_C220S/PVA_/S267K/L368D/K370S-Fc(216)_IgG1_C220S /PVA_/S267K/S364K/E357Q
EPKSSDKTHTCPPCPAPPVAGPSVFLFPPKPKDTLMISRTPEVTCVVVDVKHEDPEVKFNWYVDGVEVHNAKTKPREEEYNSTYRVVSVLTVLHQDWLNGKEYKCKVSNKALPAPIEKTISKAKGQPREPQVYTLPPSREEMTKNQVSLTCDVSGFYPSDIAVEWESDGQPENNYKTTPPVLDSDGSFFLYSKLTVDKSRWEQGDVFSCSVMHEALHNHYTQKSLSLSPGK

SEQ ID NO: 1793 - protein, 479 aa, synthetic construct; identical to SEQ ID NO: 1769
  source 1..479: note = XENP40480 Chain 2 - empty_Fc-1D2B4[NKG2D]_H1L1_scFv(GKPGS)4-Fc(216)_IgG1_pI(-)_ Isosteric_A_C220S/PVA_/S267K/L368D/K370S-Fc(216)_IgG1_C220S /PVA_/S267K/S364K/E357Q

SEQ ID NO: 1794 - protein, 231 aa, synthetic construct; identical to SEQ ID NO: 1792
  source 1..231: note = XENP40481 Chain 1 - empty_Fc-1D2B4[NKG2D]_L1H1_scFv(GKPGS)4-Fc(216)_IgG1_pI(-)_ Isosteric_A_C220S/PVA_/S267K/L368D/K370S-Fc(216)_IgG1_C220S /PVA_/S267K/S364K/E357Q

SEQ ID NO: 1795 - protein, 479 aa, synthetic construct
  source 1..479: note = XENP40481 Chain 2 - empty_Fc-1D2B4[NKG2D]_L1H1_scFv(GKPGS)4-Fc(216)_IgG1_pI(-)_ Isosteric_A_C220S/PVA_/S267K/L368D/K370S-Fc(216)_IgG1_C220S /PVA_/S267K/S364K/E357Q
DIQMTQSPSSLSASVGDRVTITCRASQSISSYLNWYQQKPGKAPKLLIYAASSLQSGVPSRFSGSGSGTDFTLTISSLQPEDFATYYCQQSYSTPYTFGQGTKLEIKGKPGSGKPGSGKPGSGKPGSEVQLLESGGGLVQPGGSLRLSCAASGFTFSSFGMSWVRQAPGKGLEWVSTISGSGSTTYYADSVKGRFTISRDNSKNTLYLQMNSLRAEDTAVYYCAKGVFSEWHYYFDYWGQGTLVTVSSEPKSSDKTHTCPPCPAPPVAGPSVFLFPPKPKDTLMISRTPEVTCVVVDVKHEDPEVKFNWYVDGVEVHNAKTKPREEQYNSTYRVVSVLTVLHQDWLNGKEYKCKVSNKALPAPIEKTISKAKGQPREPQVYTLPPSREQMTKNQVKLTCLVKGFYPSDIAVEWESNGQPENNYKTTPPVLDSDGSFFLYSKLTVDKSRWQQGNVFSCSVMHEALHNHYTQKSLSLSPGK

SEQ ID NO: 1796 - protein, 231 aa, synthetic construct; identical to SEQ ID NO: 1792
  source 1..231: note = XENP40482 Chain 1 - empty_Fc-1D7B4[NKG2D]_H1L1_scFv(GKPGS)4-Fc(216)_IgG1_pI(-)_ Isosteric_A_C220S/PVA_/S267K/L368D/K370S-Fc(216)_IgG1_C220S /PVA_/S267K/S364K/E357Q

SEQ ID NO: 1797 - protein, 479 aa, synthetic construct; identical to SEQ ID NO: 1039
  source 1..479: note = XENP40482 Chain 2 - empty_Fc-1D7B4[NKG2D]_H1L1_scFv(GKPGS)4-Fc(216)_IgG1_pI(-)_ Isosteric_A_C220S/PVA_/S267K/L368D/K370S-Fc(216)_IgG1_C220S /PVA_/S267K/S364K/E357Q

SEQ ID NO: 1798 - protein, 231 aa, synthetic construct; identical to SEQ ID NO: 1792
  source 1..231: note = XENP40483 Chain 1 - empty_Fc-1D7B4[NKG2D]_L1H1_scFv(GKPGS)4-Fc(216)_IgG1_pI(-)_ Isosteric_A_C220S/PVA_/S267K/L368D/K370S-Fc(216)_IgG1_C220S /PVA_/S267K/S364K/E357Q

SEQ ID NO: 1799 - protein, 479 aa, synthetic construct
  source 1..479: note = XENP40483 Chain 2 - empty_Fc-1D7B4[NKG2D]_L1H1_scFv(GKPGS)4-Fc(216)_IgG1_pI(-)_ Isosteric_A_C220S/PVA_/S267K/L368D/K370S-Fc(216)_IgG1_C220S /PVA_/S267K/S364K/E357Q
DIQMTQSPSSLSASVGDRVTITCRASQSISSYLNWYQQKPGKAPKLLIYAASSLQSGVPSRFSGSGSGTDFTLTISSLQPEDFATYYCQQSYSTPYTFGQGTKLEIKGKPGSGKPGSGKPGSGKPGSEVQLLESGGGLVQPGGSLRLSCAASGFTFSSYAMSWVRQAPGKGLEWVSSISASGGSTYYADSVKGRFTISRDNSKNTLYLQMNSLRAEDTAVYYCAKGIFSIYFFYFDYWGQGTLVTVSSEPKSSDKTHTCPPCPAPPVAGPSVFLFPPKPKDTLMISRTPEVTCVVVDVKHEDPEVKFNWYVDGVEVHNAKTKPREEQYNSTYRVVSVLTVLHQDWLNGKEYKCKVSNKALPAPIEKTISKAKGQPREPQVYTLPPSREQMTKNQVKLTCLVKGFYPSDIAVEWESNGQPENNYKTTPPVLDSDGSFFLYSKLTVDKSRWQQGNVFSCSVMHEALHNHYTQKSLSLSPGK

SEQ ID NO: 1800 - protein, 447 aa, synthetic construct; identical to SEQ ID NO: 4
  source 1..447: note = XENP40484 Chain 1 - 38E2[B7H3]_H2_L1.1_Fab-1D2B4[NKG2D]_H1L1_scFv(GKPGS)4-IgG1_ pI(-)_Isosteric_A_S239D/I332E/L368D/K370S-Fc(216)_IgG1_C220 S/S364K/E357Q

SEQ ID NO: 1801 - protein, 480 aa, synthetic construct; identical to SEQ ID NO: 1035
  source 1..480: note = XENP40484 Chain 2 - 38E2[B7H3]_H2_L1.1_Fab-1D2B4[NKG2D]_H1L1_scFv(GKPGS)4-IgG1_ pI(-)_Isosteric_A_S239D/I332E/L368D/K370S-Fc(216)_IgG1_C220 S/S364K/E357Q

SEQ ID NO: 1802 - protein, 217 aa, synthetic construct; identical to SEQ ID NO: 6
  source 1..217: note = XENP40484 Chain 3 - 38E2[B7H3]_H2_L1.1_Fab-1D2B4[NKG2D]_H1L1_scFv(GKPGS)4-IgG1_ pI(-)_Isosteric_A_S239D/I332E/L368D/K370S-Fc(216)_IgG1_C220 S/S364K/E357Q

SEQ ID NO: 1803 - protein, 447 aa, synthetic construct; identical to SEQ ID NO: 988
  source 1..447: note = XENP40485 Chain 1 - 38E2[B7H3]_H2_L1.1_Fab-1D2B4[NKG2D]_H1L1_scFv(GKPGS)4-IgG1_ pI(-)_Isosteric_A_L368D/K370S-Fc(216)_IgG1_C220S/S239D/I332 E/S364K/E357Q

SEQ ID NO: 1804 - protein, 480 aa, synthetic construct; identical to SEQ ID NO: 16
  source 1..480: note = XENP40485 Chain 2 - 38E2[B7H3]_H2_L1.1_Fab-1D2B4[NKG2D]_H1L1_scFv(GKPGS)4-IgG1_ pI(-)_Isosteric_A_L368D/K370S-Fc(216)_IgG1_C220S/S239D/I332 E/S364K/E357Q

SEQ ID NO: 1805 - protein, 217 aa, synthetic construct; identical to SEQ ID NO: 6
  source 1..217: note = XENP40485 Chain 3 - 38E2[B7H3]_H2_L1.1_Fab-1D2B4[NKG2D]_H1L1_scFv(GKPGS)4-IgG1_ pI(-)_Isosteric_A_L368D/K370S-Fc(216)_IgG1_C220S/S239D/I332 E/S364K/E357Q

SEQ ID NO: 1806 - protein, 447 aa, synthetic construct; identical to SEQ ID NO: 4
  source 1..447: note = XENP40486 Chain 1 - 38E2[B7H3]_H2_L1.1_Fab-1D7B4[NKG2D]_H1L1_scFv(GKPGS)4-IgG1_ pI(-)_Isosteric_A_S239D/I332E/L368D/K370S-Fc(216)_IgG1_C220 S/S364K/E357Q

SEQ ID NO: 1807 - protein, 480 aa, synthetic construct; identical to SEQ ID NO: 1037
  source 1..480: note = XENP40486 Chain 2 - 38E2[B7H3]_H2_L1.1_Fab-1D7B4[NKG2D]_H1L1_scFv(GKPGS)4-IgG1_ pI(-)_Isosteric_A_S239D/I332E/L368D/K370S-Fc(216)_IgG1_C220 S/S364K/E357Q

SEQ ID NO: 1808 - protein, 217 aa, synthetic construct; identical to SEQ ID NO: 6
  source 1..217: note = XENP40486 Chain 3 - 38E2[B7H3]_H2_L1.1_Fab-1D7B4[NKG2D]_H1L1_scFv(GKPGS)4-IgG1_ pI(-)_Isosteric_A_S239D/I332E/L368D/K370S-Fc(216)_IgG1_C220 S/S364K/E357Q

SEQ ID NO: 1809 - protein, 447 aa, synthetic construct; identical to SEQ ID NO: 988
  source 1..447: note = XENP40487 Chain 1 - 38E2[B7H3]_H2_L1.1_Fab-1D7B4[NKG2D]_H1L1_scFv(GKPGS)4-IgG1_ pI(-)_Isosteric_A_L368D/K370S-Fc(216)_IgG1_C220S/S239D/I332 E/S364K/E357Q

SEQ ID NO: 1810 - protein, 480 aa, synthetic construct; identical to SEQ ID NO: 5
  source 1..480: note = XENP40487 Chain 2 - 38E2[B7H3]_H2_L1.1_Fab-1D7B4[NKG2D]_H1L1_scFv(GKPGS)4-IgG1_ pI(-)_Isosteric_A_L368D/K370S-Fc(216)_IgG1_C220S/S239D/I332 E/S364K/E357Q

SEQ ID NO: 1811 - protein, 217 aa, synthetic construct; identical to SEQ ID NO: 6
  source 1..217: note = XENP40487 Chain 3 - 38E2[B7H3]_H2_L1.1_Fab-1D7B4[NKG2D]_H1L1_scFv(GKPGS)4-IgG1_ pI(-)_Isosteric_A_L368D/K370S-Fc(216)_IgG1_C220S/S239D/I332 E/S364K/E357Q

SEQ ID NO: 1812 - protein, 447 aa, synthetic construct; identical to SEQ ID NO: 4
  source 1..447: note = XENP40488 Chain 1 - 38E2[B7H3]_H2_L1.1_Fab-humON72[NKG2D]_H1L1_scFv(GKPGS)4-IgG 1_pI(-)_Isosteric_A_S239D/I332E/L368D/K370S-Fc(216)_IgG1_C2 20S/S364K/E357Q

SEQ ID NO: 1813 - protein, 481 aa, synthetic construct; identical to SEQ ID NO: 1772
  source 1..481: note = XENP40488 Chain 2 - 38E2[B7H3]_H2_L1.1_Fab-humON72[NKG2D]_H1L1_scFv(GKPGS)4-IgG 1_pI(-)_Isosteric_A_S239D/I332E/L368D/K370S-Fc(216)_IgG1_C2 20S/S364K/E357Q

SEQ ID NO: 1814 - protein, 217 aa, synthetic construct; identical to SEQ ID NO: 6
  source 1..217: note = XENP40488 Chain 3 - 38E2[B7H3]_H2_L1.1_Fab-humON72[NKG2D]_H1L1_scFv(GKPGS)4-IgG 1_pI(-)_Isosteric_A_S239D/I332E/L368D/K370S-Fc(216)_IgG1_C2 20S/S364K/E357Q

SEQ ID NO: 1815 - protein, 447 aa, synthetic construct; identical to SEQ ID NO: 988
  source 1..447: note = XENP40489 Chain 1 - 38E2[B7H3]_H2_L1.1_Fab-humON72[NKG2D]_H1L1_scFv(GKPGS)4-IgG 1_pI(-)_Isosteric_A_L368D/K370S-Fc(216)_IgG1_C220S/S239D/I3 32E/S364K/E357Q

SEQ ID NO: 1816 - protein, 481 aa, synthetic construct; identical to SEQ ID NO: 1778
  source 1..481: note = XENP40489 Chain 2 - 38E2[B7H3]_H2_L1.1_Fab-humON72[NKG2D]_H1L1_scFv(GKPGS)4-IgG 1_pI(-)_Isosteric_A_L368D/K370S-Fc(216)_IgG1_C220S/S239D/I3 32E/S364K/E357Q

SEQ ID NO: 1817 - protein, 217 aa, synthetic construct; identical to SEQ ID NO: 6
  source 1..217: note = XENP40489 Chain 3 - 38E2[B7H3]_H2_L1.1_Fab-humON72[NKG2D]_H1L1_scFv(GKPGS)4-IgG 1_pI(-)_Isosteric_A_L368D/K370S-Fc(216)_IgG1_C220S/S239D/I3 32E/S364K/E357Q

SEQ ID NO: 1818 - protein, 447 aa, synthetic construct; identical to SEQ ID NO: 4
  source 1..447: note = XENP40490 Chain 1 - 38E2[B7H3]_H2_L1.1_Fab-ADI27744_A44[NKG2D]_H0L0_scFv(GKPGS) 4-IgG1_pI(-)_Isosteric_A_S239D/I332E/L368D/K370S-Fc(216)_Ig G1_C220S/S364K/E357Q

SEQ ID NO: 1819 - protein, 480 aa, synthetic construct; identical to SEQ ID NO: 1043
  source 1..480: note = XENP40490 Chain 2 - 38E2[B7H3]_H2_L1.1_Fab-ADI27744_A44[NKG2D]_H0L0_scFv(GKPGS) 4-IgG1_pI(-)_Isosteric_A_S239D/I332E/L368D/K370S-Fc(216)_Ig G1_C220S/S364K/E357Q

SEQ ID NO: 1820 - protein, 217 aa, synthetic construct; identical to SEQ ID NO: 6
  source 1..217: note = XENP40490 Chain 3 - 38E2[B7H3]_H2_L1.1_Fab-ADI27744_A44[NKG2D]_H0L0_scFv(GKPGS) 4-IgG1_pI(-)_Isosteric_A_S239D/I332E/L368D/K370S-Fc(216)_Ig G1_C220S/S364K/E357Q

SEQ ID NO: 1821 - protein, 447 aa, synthetic construct; identical to SEQ ID NO: 988
  source 1..447: note = XENP40491 Chain 1 - 38E2[B7H3]_H2_L1.1_Fab-ADI27744_A44[NKG2D]_H0L0_scFv(GKPGS) 4-IgG1_pI(-)_Isosteric_A_L368D/K370S-Fc(216)_IgG1_C220S/S23 9D/I332E/S364K/E357Q

SEQ ID NO: 1822 - protein, 480 aa, synthetic construct; identical to SEQ ID NO: 1784
  source 1..480: note = XENP40491 Chain 2 - 38E2[B7H3]_H2_L1.1_Fab-ADI27744_A44[NKG2D]_H0L0_scFv(GKPGS) 4-IgG1_pI(-)_Isosteric_A_L368D/K370S-Fc(216)_IgG1_C220S/S23 9D/I332E/S364K/E357Q

SEQ ID NO: 1823 - protein, 217 aa, synthetic construct; identical to SEQ ID NO: 6
  source 1..217: note = XENP40491 Chain 3 - 38E2[B7H3]_H2_L1.1_Fab-ADI27744_A44[NKG2D]_H0L0_scFv(GKPGS) 4-IgG1_pI(-)_Isosteric_A_L368D/K370S-Fc(216)_IgG1_C220S/S23 9D/I332E/S364K/E357Q

SEQ ID NO: 1824 - protein, 447 aa, synthetic construct; identical to SEQ ID NO: 4
  source 1..447: note = XENP40492 Chain 1 - 38E2[B7H3]_H2_L1.1_Fab-ADI27749_A49[NKG2D]_H0L0_scFv(GKPGS) 4-IgG1_pI(-)_Isosteric_A_S239D/I332E/L368D/K370S-Fc(216)_Ig G1_C220S/S364K/E357Q

SEQ ID NO: 1825 - protein, 481 aa, synthetic construct; identical to SEQ ID NO: 1045
  source 1..481: note = XENP40492 Chain 2 - 38E2[B7H3]_H2_L1.1_Fab-ADI27749_A49[NKG2D]_H0L0_scFv(GKPGS) 4-IgG1_pI(-)_Isosteric_A_S239D/I332E/L368D/K370S-Fc(216)_Ig G1_C220S/S364K/E357Q

SEQ ID NO: 1826 - protein, 217 aa, synthetic construct; identical to SEQ ID NO: 6
  source 1..217: note = XENP40492 Chain 3 - 38E2[B7H3]_H2_L1.1_Fab-ADI27749_A49[NKG2D]_H0L0_scFv(GKPGS) 4-IgG1_pI(-)_Isosteric_A_S239D/I332E/L368D/K370S-Fc(216)_Ig G1_C220S/S364K/E357Q

SEQ ID NO: 1827 - protein, 447 aa, synthetic construct; identical to SEQ ID NO: 988
  source 1..447: note = XENP40493 Chain 1 - 38E2[B7H3]_H2_L1.1_Fab-ADI27749_A49[NKG2D]_H0L0_scFv(GKPGS) 4-IgG1_pI(-)_Isosteric_A_L368D/K370S-Fc(216)_IgG1_C220S/S23 9D/I332E/S364K/E357Q

SEQ ID NO: 1828 - protein, 481 aa, synthetic construct; identical to SEQ ID NO: 1790
  source 1..481: note = XENP40493 Chain 2 - 38E2[B7H3]_H2_L1.1_Fab-ADI27749_A49[NKG2D]_H0L0_scFv(GKPGS) 4-IgG1_pI(-)_Isosteric_A_L368D/K370S-Fc(216)_IgG1_C220S/S23 9D/I332E/S364K/E357Q

SEQ ID NO: 1829 - protein, 217 aa, synthetic construct; identical to SEQ ID NO: 6
  source 1..217: note = XENP40493 Chain 3 - 38E2[B7H3]_H2_L1.1_Fab-ADI27749_A49[NKG2D]_H0L0_scFv(GKPGS) 4-IgG1_pI(-)_Isosteric_A_L368D/K370S-Fc(216)_IgG1_C220S/S23 9D/I332E/S364K/E357Q

SEQ ID NO: 1830 - protein, 446 aa, synthetic construct; identical to SEQ ID NO: 1038
  source 1..446: note = XENP40551 Chain 1 - 38E2[B7H3]_H2_L1.1_Fab-38E2[B7H3]_H2_L1.1_Fab-IgG1_pI(-)_Is osteric_A_PVA_/S267K/L368D/K370S-IgG1_PVA_/S267K/S364K/E357 Q/K447del_(G4S)3_ADI27744_A44[NKG2D]_H0_L0_scFv(GKPGS)4

SEQ ID NO: 1831 - protein, 708 aa, synthetic construct
  source 1..708: note = XENP40551 Chain 2 - 38E2[B7H3]_H2_L1.1_Fab-38E2[B7H3]_H2_L1.1_Fab-IgG1_pI(-)_Is osteric_A_PVA_/S267K/L368D/K370S-IgG1_PVA_/S267K/S364K/E357 Q/K447del_(G4S)3_ADI27744_A44[NKG2D]_H0_L0_scFv(GKPGS)4
EVQLLESGGGLVQPGGSLRLSCAVSGFSLSSYGVIWVRQAPGKGLEYVSWVSSGGSTNYASSVKGRFTISRDTSKNTVYLQMNSLRAEDTAVYFCARGATNSGTDIWGPGTLVTVSSASTKGPSVFPLAPSSKSTSGGTAALGCLVKDYFPEPVTVSWNSGALTSGVHTFPAVLQSSGLYSLSSVVTVPSSSLGTQTYICNVNHKPSNTKVDKKVEPKSCDKTHTCPPCPAPPVAGPSVFLFPPKPKDTLMISRTPEVTCVVVDVKHEDPEVKFNWYVDGVEVHNAKTKPREEQYNSTYRVVSVLTVLHQDWLNGKEYKCKVSNKALPAPIEKTISKAKGQPREPQVYTLPPSREQMTKNQVKLTCLVKGFYPSDIAVEWESNGQPENNYKTTPPVLDSDGSFFLYSKLTVDKSRWQQGNVFSCSVMHEALHNHYTQKSLSLSPGGGGGSGGGGSGGGGSEVQLLESGGGLVQPGGSLRLSCAASGFTFSSYAMSWVRQAPGKGLEWVSAISGSGGSTYYADSVKGRFTISRDNSKNTLYLQMNSLRAEDTAVYYCAKDGGYYDSGAGDYWGQGTLVTVSSGKPGSGKPGSGKPGSGKPGSDIQMTQSPSSVSASVGDRVTITCRASQGIDSWLAWYQQKPGKAPKLLIYAASSLQSGVPSRFSGSGSGTDFTLTISSLQPEDFATYYCQQGVSYPRTFGGGTKVEIK

SEQ ID NO: 1832 - protein, 217 aa, synthetic construct; identical to SEQ ID NO: 6
  source 1..217: note = XENP40551 Chain 3 - 38E2[B7H3]_H2_L1.1_Fab-38E2[B7H3]_H2_L1.1_Fab-IgG1_pI(-)_Is osteric_A_PVA_/S267K/L368D/K370S-IgG1_PVA_/S267K/S364K/E357 Q/K447del_(G4S)3_ADI27744_A44[NKG2D]_H0_L0_scFv(GKPGS)4

SEQ ID NO: 1833 - protein, 447 aa, synthetic construct; identical to SEQ ID NO: 4
  source 1..447: note = XENP40553 Chain 1 - 38E2[B7H3]_H2_L1.1_Fab-38E2[B7H3]_H2_L1.1_Fab-IgG1_pI(-)_Is osteric_A_S239D/I332E/L368D/K370S-IgG1_S239D/I332E/S364K/E3 57Q/K447del_(G4S)3_ADI27744_A44[NKG2D]_H0_L0_scFv(GKPGS)4

SEQ ID NO: 1834 - protein, 709 aa, synthetic construct
  source 1..709: note = XENP40553 Chain 2 - 38E2[B7H3]_H2_L1.1_Fab-38E2[B7H3]_H2_L1.1_Fab-IgG1_pI(-)_Is osteric_A_S239D/I332E/L368D/K370S-IgG1_S239D/I332E/S364K/E3 57Q/K447del_(G4S)3_ADI27744_A44[NKG2D]_H0_L0_scFv(GKPGS)4
EVQLLESGGGLVQPGGSLRLSCAVSGFSLSSYGVIWVRQAPGKGLEYVSWVSSGGSTNYASSVKGRFTISRDTSKNTVYLQMNSLRAEDTAVYFCARGATNSGTDIWGPGTLVTVSSASTKGPSVFPLAPSSKSTSGGTAALGCLVKDYFPEPVTVSWNSGALTSGVHTFPAVLQSSGLYSLSSVVTVPSSSLGTQTYICNVNHKPSNTKVDKKVEPKSCDKTHTCPPCPAPELLGGPDVFLFPPKPKDTLMISRTPEVTCVVVDVSHEDPEVKFNWYVDGVEVHNAKTKPREEQYNSTYRVVSVLTVLHQDWLNGKEYKCKVSNKALPAPEEKTISKAKGQPREPQVYTLPPSREQMTKNQVKLTCLVKGFYPSDIAVEWESNGQPENNYKTTPPVLDSDGSFFLYSKLTVDKSRWQQGNVFSCSVMHEALHNHYTQKSLSLSPGGGGGSGGGGSGGGGSEVQLLESGGGLVQPGGSLRLSCAASGFTFSSYAMSWVRQAPGKGLEWVSAISGSGGSTYYADSVKGRFTISRDNSKNTLYLQMNSLRAEDTAVYYCAKDGGYYDSGAGDYWGQGTLVTVSSGKPGSGKPGSGKPGSGKPGSDIQMTQSPSSVSASVGDRVTITCRASQGIDSWLAWYQQKPGKAPKLLIYAASSLQSGVPSRFSGSGSGTDFTLTISSLQPEDFATYYCQQGVSYPRTFGGGTKVEIK

SEQ ID NO: 1835 - protein, 217 aa, synthetic construct; identical to SEQ ID NO: 6
  source 1..217: note = XENP40553 Chain 3 - 38E2[B7H3]_H2_L1.1_Fab-38E2[B7H3]_H2_L1.1_Fab-IgG1_pI(-)_Is osteric_A_S239D/I332E/L368D/K370S-IgG1_S239D/I332E/S364K/E3 57Q/K447del_(G4S)3_ADI27744_A44[NKG2D]_H0_L0_scFv(GKPGS)4

SEQ ID NO: 1836 - protein, 446 aa, synthetic construct; identical to SEQ ID NO: 1038
  source 1..446: note = XENP40554 Chain 1 - 38E2[B7H3]_H2_L1.1_Fab-38E2[B7H3]_H2_L1.1_Fab-IgG1_pI(-)_Is osteric_A_PVA_/S267K/L368D/K370S-IgG1_PVA_/S267K/S364K/E357 Q/K447del_(G4S)3_1D2B4[NKG2D]_H1_L1_scFv(GKPGS)4

SEQ ID NO: 1837 - protein, 708 aa, synthetic construct
  source 1..708: note = XENP40554 Chain 2 - 38E2[B7H3]_H2_L1.1_Fab-38E2[B7H3]_H2_L1.1_Fab-IgG1_pI(-)_Is osteric_A_PVA_/S267K/L368D/K370S-IgG1_PVA_/S267K/S364K/E357 Q/K447del_(G4S)3_1D2B4[NKG2D]_H1_L1_scFv(GKPGS)4
EVQLLESGGGLVQPGGSLRLSCAVSGFSLSSYGVIWVRQAPGKGLEYVSWVSSGGSTNYASSVKGRFTISRDTSKNTVYLQMNSLRAEDTAVYFCARGATNSGTDIWGPGTLVTVSSASTKGPSVFPLAPSSKSTSGGTAALGCLVKDYFPEPVTVSWNSGALTSGVHTFPAVLQSSGLYSLSSVVTVPSSSLGTQTYICNVNHKPSNTKVDKKVEPKSCDKTHTCPPCPAPPVAGPSVFLFPPKPKDTLMISRTPEVTCVVVDVKHEDPEVKFNWYVDGVEVHNAKTKPREEQYNSTYRVVSVLTVLHQDWLNGKEYKCKVSNKALPAPIEKTISKAKGQPREPQVYTLPPSREQMTKNQVKLTCLVKGFYPSDIAVEWESNGQPENNYKTTPPVLDSDGSFFLYSKLTVDKSRWQQGNVFSCSVMHEALHNHYTQKSLSLSPGGGGGSGGGGSGGGGSEVQLLESGGGLVQPGGSLRLSCAASGFTFSSFGMSWVRQAPGKGLEWVSTISGSGSTTYYADSVKGRFTISRDNSKNTLYLQMNSLRAEDTAVYYCAKGVFSEWHYYFDYWGQGTLVTVSSGKPGSGKPGSGKPGSGKPGSDIQMTQSPSSLSASVGDRVTITCRASQSISSYLNWYQQKPGKAPKLLIYAASSLQSGVPSRFSGSGSGTDFTLTISSLQPEDFATYYCQQSYSTPYTFGQGTKLEIK

SEQ ID NO: 1838 - protein, 217 aa, synthetic construct; identical to SEQ ID NO: 6
  source 1..217: note = XENP40554 Chain 3 - 38E2[B7H3]_H2_L1.1_Fab-38E2[B7H3]_H2_L1.1_Fab-IgG1_pI(-)_Is osteric_A_PVA_/S267K/L368D/K370S-IgG1_PVA_/S267K/S364K/E357 Q/K447del_(G4S)3_1D2B4[NKG2D]_H1_L1_scFv(GKPGS)4

SEQ ID NO: 1839 - protein, 446 aa, synthetic construct; identical to SEQ ID NO: 1038
  source 1..446: note = XENP40560 Chain 1 - 38E2[B7H3]_H2_L1.1_Fab-38E2[B7H3]_H2_L1.1_Fab-IgG1_pI(-)_Is osteric_A_PVA_/S267K/L368D/K370S-IgG1_PVA_/S267K/S364K/E357 Q/K447del_(G4S)3_humON72[NKG2D]_H1_L1_scFv(GKPGS)4

SEQ ID NO: 1840 - protein, 709 aa, synthetic construct
  source 1..709: note = XENP40560 Chain 2 - 38E2[B7H3]_H2_L1.1_Fab-38E2[B7H3]_H2_L1.1_Fab-IgG1_pI(-)_Is osteric_A_PVA_/S267K/L368D/K370S-IgG1_PVA_/S267K/S364K/E357 Q/K447del_(G4S)3_humON72[NKG2D]_H1_L1_scFv(GKPGS)4
EVQLLESGGGLVQPGGSLRLSCAVSGFSLSSYGVIWVRQAPGKGLEYVSWVSSGGSTNYASSVKGRFTISRDTSKNTVYLQMNSLRAEDTAVYFCARGATNSGTDIWGPGTLVTVSSASTKGPSVFPLAPSSKSTSGGTAALGCLVKDYFPEPVTVSWNSGALTSGVHTFPAVLQSSGLYSLSSVVTVPSSSLGTQTYICNVNHKPSNTKVDKKVEPKSCDKTHTCPPCPAPPVAGPSVFLFPPKPKDTLMISRTPEVTCVVVDVKHEDPEVKFNWYVDGVEVHNAKTKPREEQYNSTYRVVSVLTVLHQDWLNGKEYKCKVSNKALPAPIEKTISKAKGQPREPQVYTLPPSREQMTKNQVKLTCLVKGFYPSDIAVEWESNGQPENNYKTTPPVLDSDGSFFLYSKLTVDKSRWQQGNVFSCSVMHEALHNHYTQKSLSLSPGGGGGSGGGGSGGGGSQVQLVQSGAEVKKPGASVKVSCKASGYTFTNYWMHWVRQAPGQGLEWMGEIDPSDIYTNYAQKFQGRVTMTRDTSTSTVYMELSSLRSEDTAVYYCARGIYDGYYVYGMDYWGQGTTVTVSSGKPGSGKPGSGKPGSGKPGSYIQMTQSPSSLSASVGDRVTITCRSSQDISNYLNWYQQKPGKAPKLLIYYTSRLHSGVPSRFSGSGSGTDFTFTISSLQPEDIATYYCQQGKTLPRTFGGGTKVEIK

SEQ ID NO: 1841 - protein, 217 aa, synthetic construct; identical to SEQ ID NO: 6
  source 1..217: note = XENP40560 Chain 3 - 38E2[B7H3]_H2_L1.1_Fab-38E2[B7H3]_H2_L1.1_Fab-IgG1_pI(-)_Is osteric_A_PVA_/S267K/L368D/K370S-IgG1_PVA_/S267K/S364K/E357 Q/K447del_(G4S)3_humON72[NKG2D]_H1_L1_scFv(GKPGS)4

SEQ ID NO: 1842 - protein, 447 aa, synthetic construct; identical to SEQ ID NO: 988
  source 1..447: note = XENP40561 Chain 1 - 38E2[B7H3]_H2_L1.1_Fab-38E2[B7H3]_H2_L1.1_Fab-IgG1_pI(-)_Is osteric_A_L368D/K370S-IgG1_S364K/E357Q/K447del_(G4S)3_humON 72[NKG2D]_H1_L1_scFv(GKPGS)4

SEQ ID NO: 1843 - protein, 710 aa, synthetic construct
  source 1..710: note = XENP40561 Chain 2 - 38E2[B7H3]_H2_L1.1_Fab-38E2[B7H3]_H2_L1.1_Fab-IgG1_pI(-)_Is osteric_A_L368D/K370S-IgG1_S364K/E357Q/K447del_(G4S)3_humON 72[NKG2D]_H1_L1_scFv(GKPGS)4
EVQLLESGGGLVQPGGSLRLSCAVSGFSLSSYGVIWVRQAPGKGLEYVSWVSSGGSTNYASSVKGRFTISRDTSKNTVYLQMNSLRAEDTAVYFCARGATNSGTDIWGPGTLVTVSSASTKGPSVFPLAPSSKSTSGGTAALGCLVKDYFPEPVTVSWNSGALTSGVHTFPAVLQSSGLYSLSSVVTVPSSSLGTQTYICNVNHKPSNTKVDKKVEPKSCDKTHTCPPCPAPELLGGPSVFLFPPKPKDTLMISRTPEVTCVVVDVSHEDPEVKFNWYVDGVEVHNAKTKPREEQYNSTYRVVSVLTVLHQDWLNGKEYKCKVSNKALPAPIEKTISKAKGQPREPQVYTLPPSREQMTKNQVKLTCLVKGFYPSDIAVEWESNGQPENNYKTTPPVLDSDGSFFLYSKLTVDKSRWQQGNVFSCSVMHEALHNHYTQKSLSLSPGGGGGSGGGGSGGGGSQVQLVQSGAEVKKPGASVKVSCKASGYTFTNYWMHWVRQAPGQGLEWMGEIDPSDIYTNYAQKFQGRVTMTRDTSTSTVYMELSSLRSEDTAVYYCARGIYDGYYVYGMDYWGQGTTVTVSSGKPGSGKPGSGKPGSGKPGSYIQMTQSPSSLSASVGDRVTITCRSSQDISNYLNWYQQKPGKAPKLLIYYTSRLHSGVPSRFSGSGSGTDFTFTISSLQPEDIATYYCQQGKTLPRTFGGGTKVEIK

SEQ ID NO: 1844 - protein, 217 aa, synthetic construct; identical to SEQ ID NO: 6
  source 1..217: note = XENP40561 Chain 3 - 38E2[B7H3]_H2_L1.1_Fab-38E2[B7H3]_H2_L1.1_Fab-IgG1_pI(-)_Is osteric_A_L368D/K370S-IgG1_S364K/E357Q/K447del_(G4S)3_humON 72[NKG2D]_H1_L1_scFv(GKPGS)4

SEQ ID NO: 1845 - protein, 447 aa, synthetic construct; identical to SEQ ID NO: 4
  source 1..447: note = XENP40562 Chain 1 - 38E2[B7H3]_H2_L1.1_Fab-38E2[B7H3]_H2_L1.1_Fab-IgG1_pI(-)_Is osteric_A_S239D/I332E/L368D/K370S-IgG1_S239D/I332E/S364K/E3 57Q/K447del_(G4S)3_humON72[NKG2D]_H1_L1_scFv(GKPGS)4

SEQ ID NO: 1846 - protein, 710 aa, synthetic construct
  source 1..710: note = XENP40562 Chain 2 - 38E2[B7H3]_H2_L1.1_Fab-38E2[B7H3]_H2_L1.1_Fab-IgG1_pI(-)_Is osteric_A_S239D/I332E/L368D/K370S-IgG1_S239D/I332E/S364K/E3 57Q/K447del_(G4S)3_humON72[NKG2D]_H1_L1_scFv(GKPGS)4
EVQLLESGGGLVQPGGSLRLSCAVSGFSLSSYGVIWVRQAPGKGLEYVSWVSSGGSTNYASSVKGRFTISRDTSKNTVYLQMNSLRAEDTAVYFCARGATNSGTDIWGPGTLVTVSSASTKGPSVFPLAPSSKSTSGGTAALGCLVKDYFPEPVTVSWNSGALTSGVHTFPAVLQSSGLYSLSSVVTVPSSSLGTQTYICNVNHKPSNTKVDKKVEPKSCDKTHTCPPCPAPELLGGPDVFLFPPKPKDTLMISRTPEVTCVVVDVSHEDPEVKFNWYVDGVEVHNAKTKPREEQYNSTYRVVSVLTVLHQDWLNGKEYKCKVSNKALPAPEEKTISKAKGQPREPQVYTLPPSREQMTKNQVKLTCLVKGFYPSDIAVEWESNGQPENNYKTTPPVLDSDGSFFLYSKLTVDKSRWQQGNVFSCSVMHEALHNHYTQKSLSLSPGGGGGSGGGGSGGGGSQVQLVQSGAEVKKPGASVKVSCKASGYTFTNYWMHWVRQAPGQGLEWMGEIDPSDIYTNYAQKFQGRVTMTRDTSTSTVYMELSSLRSEDTAVYYCARGIYDGYYVYGMDYWGQGTTVTVSSGKPGSGKPGSGKPGSGKPGSYIQMTQSPSSLSASVGDRVTITCRSSQDISNYLNWYQQKPGKAPKLLIYYTSRLHSGVPSRFSGSGSGTDFTFTISSLQPEDIATYYCQQGKTLPRTFGGGTKVEIK

SEQ ID NO: 1847 - protein, 217 aa, synthetic construct; identical to SEQ ID NO: 6
  source 1..217: note = XENP40562 Chain 3 - 38E2[B7H3]_H2_L1.1_Fab-38E2[B7H3]_H2_L1.1_Fab-IgG1_pI(-)_Is osteric_A_S239D/I332E/L368D/K370S-IgG1_S239D/I332E/S364K/E3 57Q/K447del_(G4S)3_humON72[NKG2D]_H1_L1_scFv(GKPGS)4

SEQ ID NO: 1848 - protein, 446 aa, synthetic construct; identical to SEQ ID NO: 1038
  source 1..446: note = XENP40583 Chain 1 - 38E2[B7H3]_H2_L1.1_Fab-38E2[B7H3]_H2_L1.1_Fab_ADI27744_A44[ NKG2D]_H0_L0_scFv(GKPGS)4_(G4S)2-IgG1_pI(-)_Isosteric_A_PVA _/S267K/L368D/K370S-Fc(222)_IgG1_PVA_/S267K/S364K/E357Q

SEQ ID NO: 1849 - protein, 713 aa, synthetic construct
  source 1..713: note = XENP40583 Chain 2 - 38E2[B7H3]_H2_L1.1_Fab-38E2[B7H3]_H2_L1.1_Fab_ADI27744_A44[ NKG2D]_H0_L0_scFv(GKPGS)4_(G4S)2-IgG1_pI(-)_Isosteric_A_PVA _/S267K/L368D/K370S-Fc(222)_IgG1_PVA_/S267K/S364K/E357Q
EVQLLESGGGLVQPGGSLRLSCAVSGFSLSSYGVIWVRQAPGKGLEYVSWVSSGGSTNYASSVKGRFTISRDTSKNTVYLQMNSLRAEDTAVYFCARGATNSGTDIWGPGTLVTVSSASTKGPSVFPLAPSSKSTSGGTAALGCLVKDYFPEPVTVSWNSGALTSGVHTFPAVLQSSGLYSLSSVVTVPSSSLGTQTYICNVNHKPSNTKVDKKVEPKSCGGGGSGGGGSEVQLLESGGGLVQPGGSLRLSCAASGFTFSSYAMSWVRQAPGKGLEWVSAISGSGGSTYYADSVKGRFTISRDNSKNTLYLQMNSLRAEDTAVYYCAKDGGYYDSGAGDYWGQGTLVTVSSGKPGSGKPGSGKPGSGKPGSDIQMTQSPSSVSASVGDRVTITCRASQGIDSWLAWYQQKPGKAPKLLIYAASSLQSGVPSRFSGSGSGTDFTLTISSLQPEDFATYYCQQGVSYPRTFGGGTKVEIKGGGGSGGGGSKTHTCPPCPAPPVAGPSVFLFPPKPKDTLMISRTPEVTCVVVDVKHEDPEVKFNWYVDGVEVHNAKTKPREEQYNSTYRVVSVLTVLHQDWLNGKEYKCKVSNKALPAPIEKTISKAKGQPREPQVYTLPPSREQMTKNQVKLTCLVKGFYPSDIAVEWESNGQPENNYKTTPPVLDSDGSFFLYSKLTVDKSRWQQGNVFSCSVMHEALHNHYTQKSLSLSPGK

SEQ ID NO: 1850 - protein, 217 aa, synthetic construct; identical to SEQ ID NO: 6
  source 1..217: note = XENP40583 Chain 3 - 38E2[B7H3]_H2_L1.1_Fab-38E2[B7H3]_H2_L1.1_Fab_ADI27744_A44[ NKG2D]_H0_L0_scFv(GKPGS)4_(G4S)2-IgG1_pI(-)_Isosteric_A_PVA _/S267K/L368D/K370S-Fc(222)_IgG1_PVA_/S267K/S364K/E357Q

SEQ ID NO: 1851 - protein, 447 aa, synthetic construct; identical to SEQ ID NO: 4
  source 1..447: note = XENP40585 Chain 1 - 38E2[B7H3]_H2_L1.1_Fab-38E2[B7H3]_H2_L1.1_Fab_ADI27744_A44[ NKG2D]_H0_L0_scFv(GKPGS)4_(G4S)2-IgG1_pI(-)_Isosteric_A_S23 9D/I332E/L368D/K370S-Fc(222)_IgG1_S239D/I332E/S364K/E357Q

SEQ ID NO: 1852 - protein, 714 aa, synthetic construct
  source 1..714: note = XENP40585 Chain 2 - 38E2[B7H3]_H2_L1.1_Fab-38E2[B7H3]_H2_L1.1_Fab_ADI27744_A44[ NKG2D]_H0_L0_scFv(GKPGS)4_(G4S)2-IgG1_pI(-)_Isosteric_A_S23 9D/I332E/L368D/K370S-Fc(222)_IgG1_S239D/I332E/S364K/E357Q
EVQLLESGGGLVQPGGSLRLSCAVSGFSLSSYGVIWVRQAPGKGLEYVSWVSSGGSTNYASSVKGRFTISRDTSKNTVYLQMNSLRAEDTAVYFCARGATNSGTDIWGPGTLVTVSSASTKGPSVFPLAPSSKSTSGGTAALGCLVKDYFPEPVTVSWNSGALTSGVHTFPAVLQSSGLYSLSSVVTVPSSSLGTQTYICNVNHKPSNTKVDKKVEPKSCGGGGSGGGGSEVQLLESGGGLVQPGGSLRLSCAASGFTFSSYAMSWVRQAPGKGLEWVSAISGSGGSTYYADSVKGRFTISRDNSKNTLYLQMNSLRAEDTAVYYCAKDGGYYDSGAGDYWGQGTLVTVSSGKPGSGKPGSGKPGSGKPGSDIQMTQSPSSVSASVGDRVTITCRASQGIDSWLAWYQQKPGKAPKLLIYAASSLQSGVPSRFSGSGSGTDFTLTISSLQPEDFATYYCQQGVSYPRTFGGGTKVEIKGGGGSGGGGSKTHTCPPCPAPELLGGPDVFLFPPKPKDTLMISRTPEVTCVVVDVSHEDPEVKFNWYVDGVEVHNAKTKPREEQYNSTYRVVSVLTVLHQDWLNGKEYKCKVSNKALPAPEEKTISKAKGQPREPQVYTLPPSREQMTKNQVKLTCLVKGFYPSDIAVEWESNGQPENNYKTTPPVLDSDGSFFLYSKLTVDKSRWQQGNVFSCSVMHEALHNHYTQKSLSLSPGK

SEQ ID NO: 1853 - protein, 217 aa, synthetic construct; identical to SEQ ID NO: 6
  source 1..217: note = XENP40585 Chain 3 - 38E2[B7H3]_H2_L1.1_Fab-38E2[B7H3]_H2_L1.1_Fab_ADI27744_A44[ NKG2D]_H0_L0_scFv(GKPGS)4_(G4S)2-IgG1_pI(-)_Isosteric_A_S23 9D/I332E/L368D/K370S-Fc(222)_IgG1_S239D/I332E/S364K/E357Q

SEQ ID NO: 1854 - protein, 446 aa, synthetic construct; identical to SEQ ID NO: 1038
  source 1..446: note = XENP40586 Chain 1 - 38E2[B7H3]_H2_L1.1_Fab-38E2[B7H3]_H2_L1.1_Fab_1D2B4[NKG2D]_ H1_L1_scFv(GKPGS)4_(G4S)2-IgG1_pI(-)_Isosteric_A_PVA_/S267K /L368D/K370S-Fc(222)_IgG1_PVA_/S267K/S364K/E357Q

SEQ ID NO: 1855 - protein, 713 aa, synthetic construct
  source 1..713: note = XENP40586 Chain 2 - 38E2[B7H3]_H2_L1.1_Fab-38E2[B7H3]_H2_L1.1_Fab_1D2B4[NKG2D]_ H1_L1_scFv(GKPGS)4_(G4S)2-IgG1_pI(-)_Isosteric_A_PVA_/S267K /L368D/K370S-Fc(222)_IgG1_PVA_/S267K/S364K/E357Q
EVQLLESGGGLVQPGGSLRLSCAVSGFSLSSYGVIWVRQAPGKGLEYVSWVSSGGSTNYASSVKGRFTISRDTSKNTVYLQMNSLRAEDTAVYFCARGATNSGTDIWGPGTLVTVSSASTKGPSVFPLAPSSKSTSGGTAALGCLVKDYFPEPVTVSWNSGALTSGVHTFPAVLQSSGLYSLSSVVTVPSSSLGTQTYICNVNHKPSNTKVDKKVEPKSCGGGGSGGGGSEVQLLESGGGLVQPGGSLRLSCAASGFTFSSFGMSWVRQAPGKGLEWVSTISGSGSTTYYADSVKGRFTISRDNSKNTLYLQMNSLRAEDTAVYYCAKGVFSEWHYYFDYWGQGTLVTVSSGKPGSGKPGSGKPGSGKPGSDIQMTQSPSSLSASVGDRVTITCRASQSISSYLNWYQQKPGKAPKLLIYAASSLQSGVPSRFSGSGSGTDFTLTISSLQPEDFATYYCQQSYSTPYTFGQGTKLEIKGGGGSGGGGSKTHTCPPCPAPPVAGPSVFLFPPKPKDTLMISRTPEVTCVVVDVKHEDPEVKFNWYVDGVEVHNAKTKPREEQYNSTYRVVSVLTVLHQDWLNGKEYKCKVSNKALPAPIEKTISKAKGQPREPQVYTLPPSREQMTKNQVKLTCLVKGFYPSDIAVEWESNGQPENNYKTTPPVLDSDGSFFLYSKLTVDKSRWQQGNVFSCSVMHEALHNHYTQKSLSLSPGK

SEQ ID NO: 1856 - protein, 217 aa, synthetic construct; identical to SEQ ID NO: 6
  source 1..217: note = XENP40586 Chain 3 - 38E2[B7H3]_H2_L1.1_Fab-38E2[B7H3]_H2_L1.1_Fab_1D2B4[NKG2D]_ H1_L1_scFv(GKPGS)4_(G4S)2-IgG1_pI(-)_Isosteric_A_PVA_/S267K /L368D/K370S-Fc(222)_IgG1_PVA_/S267K/S364K/E357Q

SEQ ID NO: 1857 - protein, 447 aa, synthetic construct; identical to SEQ ID NO: 4
  source 1..447: note = XENP40588 Chain 1 - 38E2[B7H3]_H2_L1.1_Fab-38E2[B7H3]_H2_L1.1_Fab_1D2B4[NKG2D]_ H1_L1_scFv(GKPGS)4_(G4S)2-IgG1_pI(-)_Isosteric_A_S239D/I332 E/L368D/K370S-Fc(222)_IgG1_S239D/I332E/S364K/E357Q

SEQ ID NO: 1858 - protein, 714 aa, synthetic construct
  source 1..714: note = XENP40588 Chain 2 - 38E2[B7H3]_H2_L1.1_Fab-38E2[B7H3]_H2_L1.1_Fab_1D2B4[NKG2D]_ H1_L1_scFv(GKPGS)4_(G4S)2-IgG1_pI(-)_Isosteric_A_S239D/I332 E/L368D/K370S-Fc(222)_IgG1_S239D/I332E/S364K/E357Q
EVQLLESGGGLVQPGGSLRLSCAVSGFSLSSYGVIWVRQAPGKGLEYVSWVSSGGSTNYASSVKGRFTISRDTSKNTVYLQMNSLRAEDTAVYFCARGATNSGTDIWGPGTLVTVSSASTKGPSVFPLAPSSKSTSGGTAALGCLVKDYFPEPVTVSWNSGALTSGVHTFPAVLQSSGLYSLSSVVTVPSSSLGTQTYICNVNHKPSNTKVDKKVEPKSCGGGGSGGGGSEVQLLESGGGLVQPGGSLRLSCAASGFTFSSFGMSWVRQAPGKGLEWVSTISGSGSTTYYADSVKGRFTISRDNSKNTLYLQMNSLRAEDTAVYYCAKGVFSEWHYYFDYWGQGTLVTVSSGKPGSGKPGSGKPGSGKPGSDIQMTQSPSSLSASVGDRVTITCRASQSISSYLNWYQQKPGKAPKLLIYAASSLQSGVPSRFSGSGSGTDFTLTISSLQPEDFATYYCQQSYSTPYTFGQGTKLEIKGGGGSGGGGSKTHTCPPCPAPELLGGPDVFLFPPKPKDTLMISRTPEVTCVVVDVSHEDPEVKFNWYVDGVEVHNAKTKPREEQYNSTYRVVSVLTVLHQDWLNGKEYKCKVSNKALPAPEEKTISKAKGQPREPQVYTLPPSREQMTKNQVKLTCLVKGFYPSDIAVEWESNGQPENNYKTTPPVLDSDGSFFLYSKLTVDKSRWQQGNVFSCSVMHEALHNHYTQKSLSLSPGK

SEQ ID NO: 1859 - protein, 217 aa, synthetic construct; identical to SEQ ID NO: 6
  source 1..217: note = XENP40588 Chain 3 - 38E2[B7H3]_H2_L1.1_Fab-38E2[B7H3]_H2_L1.1_Fab_1D2B4[NKG2D]_ H1_L1_scFv(GKPGS)4_(G4S)2-IgG1_pI(-)_Isosteric_A_S239D/I332 E/L368D/K370S-Fc(222)_IgG1_S239D/I332E/S364K/E357Q

SEQ ID NO: 1860 - protein, 446 aa, synthetic construct; identical to SEQ ID NO: 1038
  source 1..446: note = XENP40589 Chain 1 - 38E2[B7H3]_H2_L1.1_Fab-38E2[B7H3]_H2_L1.1_Fab_1D7B4[NKG2D]_ H1_L1_scFv(GKPGS)4_(G4S)2-IgG1_pI(-)_Isosteric_A_PVA_/S267K /L368D/K370S-Fc(222)_IgG1_PVA_/S267K/S364K/E357Q

SEQ ID NO: 1861 - protein, 713 aa, synthetic construct
  source 1..713: note = XENP40589 Chain 2 - 38E2[B7H3]_H2_L1.1_Fab-38E2[B7H3]_H2_L1.1_Fab_1D7B4[NKG2D]_ H1_L1_scFv(GKPGS)4_(G4S)2-IgG1_pI(-)_Isosteric_A_PVA_/S267K /L368D/K370S-Fc(222)_IgG1_PVA_/S267K/S364K/E357Q
EVQLLESGGGLVQPGGSLRLSCAVSGFSLSSYGVIWVRQAPGKGLEYVSWVSSGGSTNYASSVKGRFTISRDTSKNTVYLQMNSLRAEDTAVYFCARGATNSGTDIWGPGTLVTVSSASTKGPSVFPLAPSSKSTSGGTAALGCLVKDYFPEPVTVSWNSGALTSGVHTFPAVLQSSGLYSLSSVVTVPSSSLGTQTYICNVNHKPSNTKVDKKVEPKSCGGGGSGGGGSEVQLLESGGGLVQPGGSLRLSCAASGFTFSSYAMSWVRQAPGKGLEWVSSISASGGSTYYADSVKGRFTISRDNSKNTLYLQMNSLRAEDTAVYYCAKGIFSIYFFYFDYWGQGTLVTVSSGKPGSGKPGSGKPGSGKPGSDIQMTQSPSSLSASVGDRVTITCRASQSISSYLNWYQQKPGKAPKLLIYAASSLQSGVPSRFSGSGSGTDFTLTISSLQPEDFATYYCQQSYSTPYTFGQGTKLEIKGGGGSGGGGSKTHTCPPCPAPPVAGPSVFLFPPKPKDTLMISRTPEVTCVVVDVKHEDPEVKFNWYVDGVEVHNAKTKPREEQYNSTYRVVSVLTVLHQDWLNGKEYKCKVSNKALPAPIEKTISKAKGQPREPQVYTLPPSREQMTKNQVKLTCLVKGFYPSDIAVEWESNGQPENNYKTTPPVLDSDGSFFLYSKLTVDKSRWQQGNVFSCSVMHEALHNHYTQKSLSLSPGK

SEQ ID NO: 1862 - protein, 217 aa, synthetic construct; identical to SEQ ID NO: 6
  source 1..217: note = XENP40589 Chain 3 - 38E2[B7H3]_H2_L1.1_Fab-38E2[B7H3]_H2_L1.1_Fab_1D7B4[NKG2D]_ H1_L1_scFv(GKPGS)4_(G4S)2-IgG1_pI(-)_Isosteric_A_PVA_/S267K /L368D/K370S-Fc(222)_IgG1_PVA_/S267K/S364K/E357Q

SEQ ID NO: 1863 - protein, 446 aa, synthetic construct; identical to SEQ ID NO: 1038
  source 1..446: note = XENP40592 Chain 1 - 38E2[B7H3]_H2_L1.1_Fab-38E2[B7H3]_H2_L1.1_Fab_humON72[NKG2D ]_H1_L1_scFv(GKPGS)4_(G4S)2-IgG1_pI(-)_Isosteric_A_PVA_/S26 7K/L368D/K370S-Fc(222)_IgG1_PVA_/S267K/S364K/E357Q

SEQ ID NO: 1864 - protein, 714 aa, synthetic construct
  source 1..714: note = XENP40592 Chain 2 - 38E2[B7H3]_H2_L1.1_Fab-38E2[B7H3]_H2_L1.1_Fab_humON72[NKG2D ]_H1_L1_scFv(GKPGS)4_(G4S)2-IgG1_pI(-)_Isosteric_A_PVA_/S26 7K/L368D/K370S-Fc(222)_IgG1_PVA_/S267K/S364K/E357Q
EVQLLESGGGLVQPGGSLRLSCAVSGFSLSSYGVIWVRQAPGKGLEYVSWVSSGGSTNYASSVKGRFTISRDTSKNTVYLQMNSLRAEDTAVYFCARGATNSGTDIWGPGTLVTVSSASTKGPSVFPLAPSSKSTSGGTAALGCLVKDYFPEPVTVSWNSGALTSGVHTFPAVLQSSGLYSLSSVVTVPSSSLGTQTYICNVNHKPSNTKVDKKVEPKSCGGGGSGGGGSQVQLVQSGAEVKKPGASVKVSCKASGYTFTNYWMHWVRQAPGQGLEWMGEIDPSDIYTNYAQKFQGRVTMTRDTSTSTVYMELSSLRSEDTAVYYCARGIYDGYYVYGMDYWGQGTTVTVSSGKPGSGKPGSGKPGSGKPGSYIQMTQSPSSLSASVGDRVTITCRSSQDISNYLNWYQQKPGKAPKLLIYYTSRLHSGVPSRFSGSGSGTDFTFTISSLQPEDIATYYCQQGKTLPRTFGGGTKVEIKGGGGSGGGGSKTHTCPPCPAPPVAGPSVFLFPPKPKDTLMISRTPEVTCVVVDVKHEDPEVKFNWYVDGVEVHNAKTKPREEQYNSTYRVVSVLTVLHQDWLNGKEYKCKVSNKALPAPIEKTISKAKGQPREPQVYTLPPSREQMTKNQVKLTCLVKGFYPSDIAVEWESNGQPENNYKTTPPVLDSDGSFFLYSKLTVDKSRWQQGNVFSCSVMHEALHNHYTQKSLSLSPGK

SEQ ID NO: 1865 - protein, 217 aa, synthetic construct; identical to SEQ ID NO: 6
  source 1..217: note = XENP40592 Chain 3 - 38E2[B7H3]_H2_L1.1_Fab-38E2[B7H3]_H2_L1.1_Fab_humON72[NKG2D ]_H1_L1_scFv(GKPGS)4_(G4S)2-IgG1_pI(-)_Isosteric_A_PVA_/S26 7K/L368D/K370S-Fc(222)_IgG1_PVA_/S267K/S364K/E357Q

SEQ ID NO: 1866 - protein, 447 aa, synthetic construct; identical to SEQ ID NO: 988
  source 1..447: note = XENP40593 Chain 1 - 38E2[B7H3]_H2_L1.1_Fab-38E2[B7H3]_H2_L1.1_Fab_humON72[NKG2D ]_H1_L1_scFv(GKPGS)4_(G4S)2-IgG1_pI(-)_Isosteric_A_L368D/K3 70S-Fc(222)_IgG1_S364K/E357Q

SEQ ID NO: 1867 - protein, 715 aa, synthetic construct
  source 1..715: note = XENP40593 Chain 2 - 38E2[B7H3]_H2_L1.1_Fab-38E2[B7H3]_H2_L1.1_Fab_humON72[NKG2D ]_H1_L1_scFv(GKPGS)4_(G4S)2-IgG1_pI(-)_Isosteric_A_L368D/K3 70S-Fc(222)_IgG1_S364K/E357Q
EVQLLESGGGLVQPGGSLRLSCAVSGFSLSSYGVIWVRQAPGKGLEYVSWVSSGGSTNYASSVKGRFTISRDTSKNTVYLQMNSLRAEDTAVYFCARGATNSGTDIWGPGTLVTVSSASTKGPSVFPLAPSSKSTSGGTAALGCLVKDYFPEPVTVSWNSGALTSGVHTFPAVLQSSGLYSLSSVVTVPSSSLGTQTYICNVNHKPSNTKVDKKVEPKSCGGGGSGGGGSQVQLVQSGAEVKKPGASVKVSCKASGYTFTNYWMHWVRQAPGQGLEWMGEIDPSDIYTNYAQKFQGRVTMTRDTSTSTVYMELSSLRSEDTAVYYCARGIYDGYYVYGMDYWGQGTTVTVSSGKPGSGKPGSGKPGSGKPGSYIQMTQSPSSLSASVGDRVTITCRSSQDISNYLNWYQQKPGKAPKLLIYYTSRLHSGVPSRFSGSGSGTDFTFTISSLQPEDIATYYCQQGKTLPRTFGGGTKVEIKGGGGSGGGGSKTHTCPPCPAPELLGGPSVFLFPPKPKDTLMISRTPEVTCVVVDVSHEDPEVKFNWYVDGVEVHNAKTKPREEQYNSTYRVVSVLTVLHQDWLNGKEYKCKVSNKALPAPIEKTISKAKGQPREPQVYTLPPSREQMTKNQVKLTCLVKGFYPSDIAVEWESNGQPENNYKTTPPVLDSDGSFFLYSKLTVDKSRWQQGNVFSCSVMHEALHNHYTQKSLSLSPGK

SEQ ID NO: 1868 - protein, 217 aa, synthetic construct; identical to SEQ ID NO: 6
  source 1..217: note = XENP40593 Chain 3 - 38E2[B7H3]_H2_L1.1_Fab-38E2[B7H3]_H2_L1.1_Fab_humON72[NKG2D ]_H1_L1_scFv(GKPGS)4_(G4S)2-IgG1_pI(-)_Isosteric_A_L368D/K3 70S-Fc(222)_IgG1_S364K/E357Q

SEQ ID NO: 1869 - protein, 447 aa, synthetic construct; identical to SEQ ID NO: 4
  source 1..447: note = XENP40594 Chain 1 - 38E2[B7H3]_H2_L1.1_Fab-38E2[B7H3]_H2_L1.1_Fab_humON72[NKG2D ]_H1_L1_scFv(GKPGS)4_(G4S)2-IgG1_pI(-)_Isosteric_A_S239D/I3 32E/L368D/K370S-Fc(222)_IgG1_S239D/I332E/S364K/E357Q

SEQ ID NO: 1870 - protein, 715 aa, synthetic construct
  source 1..715: note = XENP40594 Chain 2 - 38E2[B7H3]_H2_L1.1_Fab-38E2[B7H3]_H2_L1.1_Fab_humON72[NKG2D ]_H1_L1_scFv(GKPGS)4_(G4S)2-IgG1_pI(-)_Isosteric_A_S239D/I3 32E/L368D/K370S-Fc(222)_IgG1_S239D/I332E/S364K/E357Q
EVQLLESGGGLVQPGGSLRLSCAVSGFSLSSYGVIWVRQAPGKGLEYVSWVSSGGSTNYASSVKGRFTISRDTSKNTVYLQMNSLRAEDTAVYFCARGATNSGTDIWGPGTLVTVSSASTKGPSVFPLAPSSKSTSGGTAALGCLVKDYFPEPVTVSWNSGALTSGVHTFPAVLQSSGLYSLSSVVTVPSSSLGTQTYICNVNHKPSNTKVDKKVEPKSCGGGGSGGGGSQVQLVQSGAEVKKPGASVKVSCKASGYTFTNYWMHWVRQAPGQGLEWMGEIDPSDIYTNYAQKFQGRVTMTRDTSTSTVYMELSSLRSEDTAVYYCARGIYDGYYVYGMDYWGQGTTVTVSSGKPGSGKPGSGKPGSGKPGSYIQMTQSPSSLSASVGDRVTITCRSSQDISNYLNWYQQKPGKAPKLLIYYTSRLHSGVPSRFSGSGSGTDFTFTISSLQPEDIATYYCQQGKTLPRTFGGGTKVEIKGGGGSGGGGSKTHTCPPCPAPELLGGPDVFLFPPKPKDTLMISRTPEVTCVVVDVSHEDPEVKFNWYVDGVEVHNAKTKPREEQYNSTYRVVSVLTVLHQDWLNGKEYKCKVSNKALPAPEEKTISKAKGQPREPQVYTLPPSREQMTKNQVKLTCLVKGFYPSDIAVEWESNGQPENNYKTTPPVLDSDGSFFLYSKLTVDKSRWQQGNVFSCSVMHEALHNHYTQKSLSLSPGK

SEQ ID NO: 1871 - protein, 217 aa, synthetic construct; identical to SEQ ID NO: 6
  source 1..217: note = XENP40594 Chain 3 - 38E2[B7H3]_H2_L1.1_Fab-38E2[B7H3]_H2_L1.1_Fab_humON72[NKG2D ]_H1_L1_scFv(GKPGS)4_(G4S)2-IgG1_pI(-)_Isosteric_A_S239D/I3 32E/L368D/K370S-Fc(222)_IgG1_S239D/I332E/S364K/E357Q

SEQ ID NO: 1872 - protein, 446 aa, synthetic construct; identical to SEQ ID NO: 1038
  source 1..446: note = XENP40887 Chain 1 - 38E2[B7H3]_H2_L1.1_Fab-38E2[B7H3]_H2_L1.1_Fab_ADI27749_A49[ NKG2D]_H0_L0_scFv(GKPGS)4_(G4S)2-IgG1_pI(-)_Isosteric_A_PVA _/S267K/L368D/K370S-Fc(222)_IgG1_PVA_/S267K/S364K/E357Q

SEQ ID NO: 1873 - protein, 714 aa, synthetic construct
  source 1..714: note = XENP40887 Chain 2 - 38E2[B7H3]_H2_L1.1_Fab-38E2[B7H3]_H2_L1.1_Fab_ADI27749_A49[ NKG2D]_H0_L0_scFv(GKPGS)4_(G4S)2-IgG1_pI(-)_Isosteric_A_PVA _/S267K/L368D/K370S-Fc(222)_IgG1_PVA_/S267K/S364K/E357Q
EVQLLESGGGLVQPGGSLRLSCAVSGFSLSSYGVIWVRQAPGKGLEYVSWVSSGGSTNYASSVKGRFTISRDTSKNTVYLQMNSLRAEDTAVYFCARGATNSGTDIWGPGTLVTVSSASTKGPSVFPLAPSSKSTSGGTAALGCLVKDYFPEPVTVSWNSGALTSGVHTFPAVLQSSGLYSLSSVVTVPSSSLGTQTYICNVNHKPSNTKVDKKVEPKSCGGGGSGGGGSEVQLVESGGGLVKPGGSLRLSCAASGFTFSSYSMNWVRQAPGKGLEWVSSISSSSSYIYYADSVKGRFTISRDNAKNSLYLQMNSLRAEDTAVYYCARGAPMGAAAGWFDPWGQGTLVTVSSGKPGSGKPGSGKPGSGKPGSDIQMTQSPSSVSASVGDRVTITCRASQGISSWLAWYQQKPGKAPKLLIYAASSLQSGVPSRFSGSGSGTDFTLTISSLQPEDFATYYCQQGVSFPRTFGGGTKVEIKGGGGSGGGGSKTHTCPPCPAPPVAGPSVFLFPPKPKDTLMISRTPEVTCVVVDVKHEDPEVKFNWYVDGVEVHNAKTKPREEQYNSTYRVVSVLTVLHQDWLNGKEYKCKVSNKALPAPIEKTISKAKGQPREPQVYTLPPSREQMTKNQVKLTCLVKGFYPSDIAVEWESNGQPENNYKTTPPVLDSDGSFFLYSKLTVDKSRWQQGNVFSCSVMHEALHNHYTQKSLSLSPGK

SEQ ID NO: 1874 - protein, 217 aa, synthetic construct; identical to SEQ ID NO: 6
  source 1..217: note = XENP40887 Chain 3 - 38E2[B7H3]_H2_L1.1_Fab-38E2[B7H3]_H2_L1.1_Fab_ADI27749_A49[ NKG2D]_H0_L0_scFv(GKPGS)4_(G4S)2-IgG1_pI(-)_Isosteric_A_PVA _/S267K/L368D/K370S-Fc(222)_IgG1_PVA_/S267K/S364K/E357Q

SEQ ID NO: 1875 - protein, 447 aa, synthetic construct; identical to SEQ ID NO: 4
  source 1..447: note = XENP40889 Chain 1 - 38E2[B7H3]_H2_L1.1_Fab-38E2[B7H3]_H2_L1.1_Fab_ADI27749_A49[ NKG2D]_H0_L0_scFv(GKPGS)4_(G4S)2-IgG1_pI(-)_Isosteric_A_S23 9D/I332E/L368D/K370S-Fc(222)_IgG1_S239D/I332E/S364K/E357Q

SEQ ID NO: 1876 - protein, 715 aa, synthetic construct
  source 1..715: note = XENP40889 Chain 2 - 38E2[B7H3]_H2_L1.1_Fab-38E2[B7H3]_H2_L1.1_Fab_ADI27749_A49[ NKG2D]_H0_L0_scFv(GKPGS)4_(G4S)2-IgG1_pI(-)_Isosteric_A_S23 9D/I332E/L368D/K370S-Fc(222)_IgG1_S239D/I332E/S364K/E357Q
EVQLLESGGGLVQPGGSLRLSCAVSGFSLSSYGVIWVRQAPGKGLEYVSWVSSGGSTNYASSVKGRFTISRDTSKNTVYLQMNSLRAEDTAVYFCARGATNSGTDIWGPGTLVTVSSASTKGPSVFPLAPSSKSTSGGTAALGCLVKDYFPEPVTVSWNSGALTSGVHTFPAVLQSSGLYSLSSVVTVPSSSLGTQTYICNVNHKPSNTKVDKKVEPKSCGGGGSGGGGSEVQLVESGGGLVKPGGSLRLSCAASGFTFSSYSMNWVRQAPGKGLEWVSSISSSSSYIYYADSVKGRFTISRDNAKNSLYLQMNSLRAEDTAVYYCARGAPMGAAAGWFDPWGQGTLVTVSSGKPGSGKPGSGKPGSGKPGSDIQMTQSPSSVSASVGDRVTITCRASQGISSWLAWYQQKPGKAPKLLIYAASSLQSGVPSRFSGSGSGTDFTLTISSLQPEDFATYYCQQGVSFPRTFGGGTKVEIKGGGGSGGGGSKTHTCPPCPAPELLGGPDVFLFPPKPKDTLMISRTPEVTCVVVDVSHEDPEVKFNWYVDGVEVHNAKTKPREEQYNSTYRVVSVLTVLHQDWLNGKEYKCKVSNKALPAPEEKTISKAKGQPREPQVYTLPPSREQMTKNQVKLTCLVKGFYPSDIAVEWESNGQPENNYKTTPPVLDSDGSFFLYSKLTVDKSRWQQGNVFSCSVMHEALHNHYTQKSLSLSPGK

SEQ ID NO: 1877 - protein, 217 aa, synthetic construct; identical to SEQ ID NO: 6
  source 1..217: note = XENP40889 Chain 3 - 38E2[B7H3]_H2_L1.1_Fab-38E2[B7H3]_H2_L1.1_Fab_ADI27749_A49[ NKG2D]_H0_L0_scFv(GKPGS)4_(G4S)2-IgG1_pI(-)_Isosteric_A_S23 9D/I332E/L368D/K370S-Fc(222)_IgG1_S239D/I332E/S364K/E357Q

SEQ ID NO: 1878 - protein, 446 aa, synthetic construct; identical to SEQ ID NO: 1038
  source 1..446: note = XENP40890 Chain 1 - 38E2[B7H3]_H2_L1.1_Fab-38E2[B7H3]_H2_L1.1_Fab-IgG1_pI(-)_Is osteric_A_PVA_/S267K/L368D/K370S-IgG1_PVA_/S267K/S364K/E357 Q/K447del_(G4S)3_ADI27749_A49[NKG2D]_H0_L0_scFv(GKPGS)4

SEQ ID NO: 1879 - protein, 709 aa, synthetic construct
  source 1..709: note = XENP40890 Chain 2 - 38E2[B7H3]_H2_L1.1_Fab-38E2[B7H3]_H2_L1.1_Fab-IgG1_pI(-)_Is osteric_A_PVA_/S267K/L368D/K370S-IgG1_PVA_/S267K/S364K/E357 Q/K447del_(G4S)3_ADI27749_A49[NKG2D]_H0_L0_scFv(GKPGS)4
EVQLLESGGGLVQPGGSLRLSCAVSGFSLSSYGVIWVRQAPGKGLEYVSWVSSGGSTNYASSVKGRFTISRDTSKNTVYLQMNSLRAEDTAVYFCARGATNSGTDIWGPGTLVTVSSASTKGPSVFPLAPSSKSTSGGTAALGCLVKDYFPEPVTVSWNSGALTSGVHTFPAVLQSSGLYSLSSVVTVPSSSLGTQTYICNVNHKPSNTKVDKKVEPKSCDKTHTCPPCPAPPVAGPSVFLFPPKPKDTLMISRTPEVTCVVVDVKHEDPEVKFNWYVDGVEVHNAKTKPREEQYNSTYRVVSVLTVLHQDWLNGKEYKCKVSNKALPAPIEKTISKAKGQPREPQVYTLPPSREQMTKNQVKLTCLVKGFYPSDIAVEWESNGQPENNYKTTPPVLDSDGSFFLYSKLTVDKSRWQQGNVFSCSVMHEALHNHYTQKSLSLSPGGGGGSGGGGSGGGGSEVQLVESGGGLVKPGGSLRLSCAASGFTFSSYSMNWVRQAPGKGLEWVSSISSSSSYIYYADSVKGRFTISRDNAKNSLYLQMNSLRAEDTAVYYCARGAPMGAAAGWFDPWGQGTLVTVSSGKPGSGKPGSGKPGSGKPGSDIQMTQSPSSVSASVGDRVTITCRASQGISSWLAWYQQKPGKAPKLLIYAASSLQSGVPSRFSGSGSGTDFTLTISSLQPEDFATYYCQQGVSFPRTFGGGTKVEIK

SEQ ID NO: 1880 - protein, 217 aa, synthetic construct; identical to SEQ ID NO: 6
  source 1..217: note = XENP40890 Chain 3 - 38E2[B7H3]_H2_L1.1_Fab-38E2[B7H3]_H2_L1.1_Fab-IgG1_pI(-)_Is osteric_A_PVA_/S267K/L368D/K370S-IgG1_PVA_/S267K/S364K/E357 Q/K447del_(G4S)3_ADI27749_A49[NKG2D]_H0_L0_scFv(GKPGS)4

SEQ ID NO: 1881 - protein, 447 aa, synthetic construct; identical to SEQ ID NO: 4
  source 1..447: note = XENP40892 Chain 1 - 38E2[B7H3]_H2_L1.1_Fab-38E2[B7H3]_H2_L1.1_Fab-IgG1_pI(-)_Is osteric_A_S239D/I332E/L368D/K370S-IgG1_S239D/I332E/S364K/E3 57Q/K447del_(G4S)3_ADI27749_A49[NKG2D]_H0_L0_scFv(GKPGS)4

SEQ ID NO: 1882 - protein, 710 aa, synthetic construct
  source 1..710: note = XENP40892 Chain 2 - 38E2[B7H3]_H2_L1.1_Fab-38E2[B7H3]_H2_L1.1_Fab-IgG1_pI(-)_Is osteric_A_S239D/I332E/L368D/K370S-IgG1_S239D/I332E/S364K/E3 57Q/K447del_(G4S)3_ADI27749_A49[NKG2D]_H0_L0_scFv(GKPGS)4
EVQLLESGGGLVQPGGSLRLSCAVSGFSLSSYGVIWVRQAPGKGLEYVSWVSSGGSTNYASSVKGRFTISRDTSKNTVYLQMNSLRAEDTAVYFCARGATNSGTDIWGPGTLVTVSSASTKGPSVFPLAPSSKSTSGGTAALGCLVKDYFPEPVTVSWNSGALTSGVHTFPAVLQSSGLYSLSSVVTVPSSSLGTQTYICNVNHKPSNTKVDKKVEPKSCDKTHTCPPCPAPELLGGPDVFLFPPKPKDTLMISRTPEVTCVVVDVSHEDPEVKFNWYVDGVEVHNAKTKPREEQYNSTYRVVSVLTVLHQDWLNGKEYKCKVSNKALPAPEEKTISKAKGQPREPQVYTLPPSREQMTKNQVKLTCLVKGFYPSDIAVEWESNGQPENNYKTTPPVLDSDGSFFLYSKLTVDKSRWQQGNVFSCSVMHEALHNHYTQKSLSLSPGGGGGSGGGGSGGGGSEVQLVESGGGLVKPGGSLRLSCAASGFTFSSYSMNWVRQAPGKGLEWVSSISSSSSYIYYADSVKGRFTISRDNAKNSLYLQMNSLRAEDTAVYYCARGAPMGAAAGWFDPWGQGTLVTVSSGKPGSGKPGSGKPGSGKPGSDIQMTQSPSSVSASVGDRVTITCRASQGISSWLAWYQQKPGKAPKLLIYAASSLQSGVPSRFSGSGSGTDFTLTISSLQPEDFATYYCQQGVSFPRTFGGGTKVEIK

SEQ ID NO: 1883 - protein, 217 aa, synthetic construct; identical to SEQ ID NO: 6
  source 1..217: note = XENP40892 Chain 3 - 38E2[B7H3]_H2_L1.1_Fab-38E2[B7H3]_H2_L1.1_Fab-IgG1_pI(-)_Is osteric_A_S239D/I332E/L368D/K370S-IgG1_S239D/I332E/S364K/E3 57Q/K447del_(G4S)3_ADI27749_A49[NKG2D]_H0_L0_scFv(GKPGS)4

SEQ ID NO: 1884 - protein, 451 aa, synthetic construct; identical to SEQ ID NO: 1451
  source 1..451: note = XENP40976 Chain 1 - humON72[NKG2D]_H1_L1_Fab-Numax_VHVL_scFv(GKPGS)4-IgG1_pI(-) _Isosteric_A_PVA_/S267K/L368D/K370S-Fc(216)_IgG1_C220S/PVA_ /S267K/S364K/E357Q

SEQ ID NO: 1885 - protein, 477 aa, synthetic construct; identical to SEQ ID NO: 1097
  source 1..477: note = XENP40976 Chain 2 - humON72[NKG2D]_H1_L1_Fab-Numax_VHVL_scFv(GKPGS)4-IgG1_pI(-) _Isosteric_A_PVA_/S267K/L368D/K370S-Fc(216)_IgG1_C220S/PVA_ /S267K/S364K/E357Q

SEQ ID NO: 1886 - protein, 214 aa, synthetic construct; identical to SEQ ID NO: 13
  source 1..214: note = XENP40976 Chain 3 - humON72[NKG2D]_H1_L1_Fab-Numax_VHVL_scFv(GKPGS)4-IgG1_pI(-) _Isosteric_A_PVA_/S267K/L368D/K370S-Fc(216)_IgG1_C220S/PVA_ /S267K/S364K/E357Q

SEQ ID NO: 1887 - protein, 452 aa, synthetic construct; identical to SEQ ID NO: 1469
  source 1..452: note = XENP40977 Chain 1 - humON72[NKG2D]_H1_L1_Fab-Numax_VHVL_scFv(GKPGS)4-IgG1_pI(-) _Isosteric_A_L368D/K370S-Fc(216)_IgG1_C220S/S364K/E357Q

SEQ ID NO: 1888 - protein, 478 aa, synthetic construct; identical to SEQ ID NO: 1033
  source 1..478: note = XENP40977 Chain 2 - humON72[NKG2D]_H1_L1_Fab-Numax_VHVL_scFv(GKPGS)4-IgG1_pI(-) _Isosteric_A_L368D/K370S-Fc(216)_IgG1_C220S/S364K/E357Q

SEQ ID NO: 1889 - protein, 214 aa, synthetic construct; identical to SEQ ID NO: 13
  source 1..214: note = XENP40977 Chain 3 - humON72[NKG2D]_H1_L1_Fab-Numax_VHVL_scFv(GKPGS)4-IgG1_pI(-) _Isosteric_A_L368D/K370S-Fc(216)_IgG1_C220S/S364K/E357Q

SEQ ID NO: 1890 - protein, 452 aa, synthetic construct; identical to SEQ ID NO: 12
  source 1..452: note = XENP40978 Chain 1 - humON72[NKG2D]_H1_L1_Fab-Numax_VHVL_scFv(GKPGS)4-IgG1_pI(-) _Isosteric_A_S239D/I332E/L368D/K370S-Fc(216)_IgG1_C220S/S23 9D/I332E/S364K/E357Q

SEQ ID NO: 1891 - protein, 478 aa, synthetic construct; identical to SEQ ID NO: 177
  source 1..478: note = XENP40978 Chain 2 - humON72[NKG2D]_H1_L1_Fab-Numax_VHVL_scFv(GKPGS)4-IgG1_pI(-) _Isosteric_A_S239D/I332E/L368D/K370S-Fc(216)_IgG1_C220S/S23 9D/I332E/S364K/E357Q

SEQ ID NO: 1892 - protein, 214 aa, synthetic construct; identical to SEQ ID NO: 13
  source 1..214: note = XENP40978 Chain 3 - humON72[NKG2D]_H1_L1_Fab-Numax_VHVL_scFv(GKPGS)4-IgG1_pI(-) _Isosteric_A_S239D/I332E/L368D/K370S-Fc(216)_IgG1_C220S/S23 9D/I332E/S364K/E357Q

SEQ ID NO: 1893 - protein, 450 aa, synthetic construct
  source 1..450: note = XENP41345 Chain 1 - C2B8_H1.202_L1.113_Fab-1D7B4[NKG2D]_H1L1_scFv(GKPGS)-IgG1_p I(-)_Isosteric_A_PVA_/S267K/L368D/K370S-Fc(216)_IgG1_C220S/ PVA_/S267K/S364K/E357Q
QVQLVQSGAEVKKPGASVKVSCKASGYTFTSYNMHWVRQAPGQRLEWMGAIYPGNGATSYSQKFQGRVTITADTSASTAYMELSSLRSEDTAVYYCARSYYMGGDWYFDVWGAGTLVTVSSASTKGPSVFPLAPSSKSTSGGTAALGCLVKDYFPEPVTVSWNSGALTSGVHTFPAVLQSSGLYSLSSVVTVPSSSLGTQTYICNVNHKPSDTKVDKKVEPKSCDKTHTCPPCPAPPVAGPSVFLFPPKPKDTLMISRTPEVTCVVVDVKHEDPEVKFNWYVDGVEVHNAKTKPREEEYNSTYRVVSVLTVLHQDWLNGKEYKCKVSNKALPAPIEKTISKAKGQPREPQVYTLPPSREEMTKNQVSLTCDVSGFYPSDIAVEWESDGQPENNYKTTPPVLDSDGSFFLYSKLTVDKSRWEQGDVFSCSVMHEALHNHYTQKSLSLSPGK

SEQ ID NO: 1894 - protein, 479 aa, synthetic construct; identical to SEQ ID NO: 1039
  source 1..479: note = XENP41345 Chain 2 - C2B8_H1.202_L1.113_Fab-1D7B4[NKG2D]_H1L1_scFv(GKPGS)-IgG1_p I(-)_Isosteric_A_PVA_/S267K/L368D/K370S-Fc(216)_IgG1_C220S/ PVA_/S267K/S364K/E357Q

SEQ ID NO: 1895 - protein, 213 aa, synthetic construct
  source 1..213: note = XENP41345 Chain 3 - C2B8_H1.202_L1.113_Fab-1D7B4[NKG2D]_H1L1_scFv(GKPGS)-IgG1_p I(-)_Isosteric_A_PVA_/S267K/L368D/K370S-Fc(216)_IgG1_C220S/ PVA_/S267K/S364K/E357Q
QIVLTQSPSSLSASVGDRVTITCRASWSVSYIHWFQQKPGKSPKPLIYATSNLASGVPVRFSGSGSGTDYTLTISSLQPEDFATYYCQQWTHNPPTFGGGTKVEIKRTVAAPSVFIFPPSDEQLKSGTASVVCLLNNFYPREAKVQWKVDNALQSGNSQESVTEQDSKDSTYSLSSTLTLSKADYEKHKVYACEVTHQGLSSPVTKSFNRGEC

SEQ ID NO: 1896 - protein, 450 aa, synthetic construct; identical to SEQ ID NO: 940
  source 1..450: note = XENP42069 Chain 1 - 1D7B4[NKG2D]_H1.1_L1_IgG1_PVA_/S267K

SEQ ID NO: 1897 - protein, 214 aa, synthetic construct; identical to SEQ ID NO: 3
  source 1..214: note = XENP42069 Chain 2 - 1D7B4[NKG2D]_H1.1_L1_IgG1_PVA_/S267K

SEQ ID NO: 1898 - protein, 450 aa, synthetic construct; identical to SEQ ID NO: 941
  source 1..450: note = XENP42070 Chain 1 - 1D7B4[NKG2D]_H1.2_L1_IgG1_PVA_/S267K

SEQ ID NO: 1899 - protein, 214 aa, synthetic construct; identical to SEQ ID NO: 3
  source 1..214: note = XENP42070 Chain 2 - 1D7B4[NKG2D]_H1.2_L1_IgG1_PVA_/S267K

SEQ ID NO: 1900 - protein, 450 aa, synthetic construct; identical to SEQ ID NO: 942
  source 1..450: note = XENP42071 Chain 1 - 1D7B4[NKG2D]_H1.3_L1_IgG1_PVA_/S267K

SEQ ID NO: 1901 - protein, 214 aa, synthetic construct; identical to SEQ ID NO: 3
  source 1..214: note = XENP42071 Chain 2 - 1D7B4[NKG2D]_H1.3_L1_IgG1_PVA_/S267K

SEQ ID NO: 1902 - protein, 450 aa, synthetic construct; identical to SEQ ID NO: 943
  source 1..450: note = XENP42072 Chain 1 - 1D7B4[NKG2D]_H1.4_L1_IgG1_PVA_/S267K

SEQ ID NO: 1903 - protein, 214 aa, synthetic construct; identical to SEQ ID NO: 3
  source 1..214: note = XENP42072 Chain 2 - 1D7B4[NKG2D]_H1.4_L1_IgG1_PVA_/S267K

SEQ ID NO: 1904 - protein, 450 aa, synthetic construct; identical to SEQ ID NO: 944
  source 1..450: note = XENP42073 Chain 1 - 1D7B4[NKG2D]_H1.5_L1_IgG1_PVA_/S267K

SEQ ID NO: 1905 - protein, 214 aa, synthetic construct; identical to SEQ ID NO: 3
  source 1..214: note = XENP42073 Chain 2 - 1D7B4[NKG2D]_H1.5_L1_IgG1_PVA_/S267K

SEQ ID NO: 1906 - protein, 450 aa, synthetic construct; identical to SEQ ID NO: 945
  source 1..450: note = XENP42074 Chain 1 - 1D7B4[NKG2D]_H1.6_L1_IgG1_PVA_/S267K

SEQ ID NO: 1907 - protein, 214 aa, synthetic construct; identical to SEQ ID NO: 3
  source 1..214: note = XENP42074 Chain 2 - 1D7B4[NKG2D]_H1.6_L1_IgG1_PVA_/S267K

SEQ ID NO: 1908 - protein, 450 aa, synthetic construct; identical to SEQ ID NO: 946
  source 1..450: note = XENP42075 Chain 1 - 1D7B4[NKG2D]_H1.7_L1_IgG1_PVA_/S267K

SEQ ID NO: 1909 - protein, 214 aa, synthetic construct; identical to SEQ ID NO: 3
  source 1..214: note = XENP42075 Chain 2 - 1D7B4[NKG2D]_H1.7_L1_IgG1_PVA_/S267K

SEQ ID NO: 1910 - protein, 450 aa, synthetic construct; identical to SEQ ID NO: 947
  source 1..450: note = XENP42076 Chain 1 - 1D7B4[NKG2D]_H1.8_L1_IgG1_PVA_/S267K

SEQ ID NO: 1911 - protein, 214 aa, synthetic construct; identical to SEQ ID NO: 3
  source 1..214: note = XENP42076 Chain 2 - 1D7B4[NKG2D]_H1.8_L1_IgG1_PVA_/S267K

SEQ ID NO: 1912 - protein, 450 aa, synthetic construct; identical to SEQ ID NO: 948
  source 1..450: note = XENP42077 Chain 1 - 1D7B4[NKG2D]_H1.9_L1_IgG1_PVA_/S267K

SEQ ID NO: 1913 - protein, 214 aa, synthetic construct; identical to SEQ ID NO: 3
  source 1..214: note = XENP42077 Chain 2 - 1D7B4[NKG2D]_H1.9_L1_IgG1_PVA_/S267K

SEQ ID NO: 1914 - protein, 450 aa, synthetic construct; identical to SEQ ID NO: 949
  source 1..450: note = XENP42078 Chain 1 - 1D7B4[NKG2D]_H1.10_L1_IgG1_PVA_/S267K

SEQ ID NO: 1915 - protein, 214 aa, synthetic construct; identical to SEQ ID NO: 3
  source 1..214: note = XENP42078 Chain 2 - 1D7B4[NKG2D]_H1.10_L1_IgG1_PVA_/S267K

SEQ ID NO: 1916 - protein, 450 aa, synthetic construct; identical to SEQ ID NO: 950
  source 1..450: note = XENP42079 Chain 1 - 1D7B4[NKG2D]_H1.11_L1_IgG1_PVA_/S267K

SEQ ID NO: 1917 - protein, 214 aa, synthetic construct; identical to SEQ ID NO: 3
  source 1..214: note = XENP42079 Chain 2 - 1D7B4[NKG2D]_H1.11_L1_IgG1_PVA_/S267K

SEQ ID NO: 1918 - protein, 450 aa, synthetic construct; identical to SEQ ID NO: 951
  source 1..450: note = XENP42080 Chain 1 - 1D7B4[NKG2D]_H1.12_L1_IgG1_PVA_/S267K

SEQ ID NO: 1919 - protein, 214 aa, synthetic construct; identical to SEQ ID NO: 3
  source 1..214: note = XENP42080 Chain 2 - 1D7B4[NKG2D]_H1.12_L1_IgG1_PVA_/S267K

SEQ ID NO: 1920 - protein, 450 aa, synthetic construct; identical to SEQ ID NO: 952
  source 1..450: note = XENP42081 Chain 1 - 1D7B4[NKG2D]_H1.13_L1_IgG1_PVA_/S267K

SEQ ID NO: 1921 - protein, 214 aa, synthetic construct; identical to SEQ ID NO: 3
  source 1..214: note = XENP42081 Chain 2 - 1D7B4[NKG2D]_H1.13_L1_IgG1_PVA_/S267K

SEQ ID NO: 1922 - protein, 450 aa, synthetic construct; identical to SEQ ID NO: 953
  source 1..450: note = XENP42082 Chain 1 - 1D7B4[NKG2D]_H1.14_L1_IgG1_PVA_/S267K

SEQ ID NO: 1923 - protein, 214 aa, synthetic construct; identical to SEQ ID NO: 3
  source 1..214: note = XENP42082 Chain 2 - 1D7B4[NKG2D]_H1.14_L1_IgG1_PVA_/S267K

SEQ ID NO: 1924 - protein, 450 aa, synthetic construct; identical to SEQ ID NO: 954
  source 1..450: note = XENP42083 Chain 1 - 1D7B4[NKG2D]_H1.15_L1_IgG1_PVA_/S267K

SEQ ID NO: 1925 - protein, 214 aa, synthetic construct; identical to SEQ ID NO: 3
  source 1..214: note = XENP42083 Chain 2 - 1D7B4[NKG2D]_H1.15_L1_IgG1_PVA_/S267K

SEQ ID NO: 1926 - protein, 450 aa, synthetic construct; identical to SEQ ID NO: 955
  source 1..450: note = XENP42084 Chain 1 - 1D7B4[NKG2D]_H1.16_L1_IgG1_PVA_/S267K

SEQ ID NO: 1927 - protein, 214 aa, synthetic construct; identical to SEQ ID NO: 3
  source 1..214: note = XENP42084 Chain 2 - 1D7B4[NKG2D]_H1.16_L1_IgG1_PVA_/S267K

SEQ ID NO: 1928 - protein, 450 aa, synthetic construct; identical to SEQ ID NO: 956
  source 1..450: note = XENP42085 Chain 1 - 1D7B4[NKG2D]_H1.17_L1_IgG1_PVA_/S267K

SEQ ID NO: 1929 - protein, 214 aa, synthetic construct; identical to SEQ ID NO: 3
  source 1..214: note = XENP42085 Chain 2 - 1D7B4[NKG2D]_H1.17_L1_IgG1_PVA_/S267K

SEQ ID NO: 1930 - protein, 450 aa, synthetic construct; identical to SEQ ID NO: 957
  source 1..450: note = XENP42086 Chain 1 - 1D7B4[NKG2D]_H1.18_L1_IgG1_PVA_/S267K

SEQ ID NO: 1931 - protein, 214 aa, synthetic construct; identical to SEQ ID NO: 3
  source 1..214: note = XENP42086 Chain 2 - 1D7B4[NKG2D]_H1.18_L1_IgG1_PVA_/S267K

SEQ ID NO: 1932 - protein, 450 aa, synthetic construct; identical to SEQ ID NO: 958
  source 1..450: note = XENP42087 Chain 1 - 1D7B4[NKG2D]_H1.19_L1_IgG1_PVA_/S267K

SEQ ID NO: 1933 - protein, 214 aa, synthetic construct; identical to SEQ ID NO: 3
  source 1..214: note = XENP42087 Chain 2 - 1D7B4[NKG2D]_H1.19_L1_IgG1_PVA_/S267K

SEQ ID NO: 1934 - protein, 450 aa, synthetic construct; identical to SEQ ID NO: 959
  source 1..450: note = XENP42088 Chain 1 - 1D7B4[NKG2D]_H1.20_L1_IgG1_PVA_/S267K

SEQ ID NO: 1935 - protein, 214 aa, synthetic construct; identical to SEQ ID NO: 3
  source 1..214: note = XENP42088 Chain 2 - 1D7B4[NKG2D]_H1.20_L1_IgG1_PVA_/S267K

SEQ ID NO: 1936 - protein, 450 aa, synthetic construct; identical to SEQ ID NO: 960
  source 1..450: note = XENP42089 Chain 1 - 1D7B4[NKG2D]_H1.21_L1_IgG1_PVA_/S267K

SEQ ID NO: 1937 - protein, 214 aa, synthetic construct; identical to SEQ ID NO: 3
  source 1..214: note = XENP42089 Chain 2 - 1D7B4[NKG2D]_H1.21_L1_IgG1_PVA_/S267K

SEQ ID NO: 1938 - protein, 450 aa, synthetic construct; identical to SEQ ID NO: 961
  source 1..450: note = XENP42090 Chain 1 - 1D7B4[NKG2D]_H1.22_L1_IgG1_PVA_/S267K

SEQ ID NO: 1939 - protein, 214 aa, synthetic construct; identical to SEQ ID NO: 3
  source 1..214: note = XENP42090 Chain 2 - 1D7B4[NKG2D]_H1.22_L1_IgG1_PVA_/S267K

SEQ ID NO: 1940 - protein, 450 aa, synthetic construct; identical to SEQ ID NO: 962
  source 1..450: note = XENP42091 Chain 1 - 1D7B4[NKG2D]_H1.23_L1_IgG1_PVA_/S267K

SEQ ID NO: 1941 - protein, 214 aa, synthetic construct; identical to SEQ ID NO: 3
  source 1..214: note = XENP42091 Chain 2 - 1D7B4[NKG2D]_H1.23_L1_IgG1_PVA_/S267K

SEQ ID NO: 1942 - protein, 450 aa, synthetic construct; identical to SEQ ID NO: 963
  source 1..450: note = XENP42092 Chain 1 - 1D7B4[NKG2D]_H1.24_L1_IgG1_PVA_/S267K

SEQ ID NO: 1943 - protein, 214 aa, synthetic construct; identical to SEQ ID NO: 3
  source 1..214: note = XENP42092 Chain 2 - 1D7B4[NKG2D]_H1.24_L1_IgG1_PVA_/S267K

SEQ ID NO: 1944 - protein, 450 aa, synthetic construct; identical to SEQ ID NO: 964
  source 1..450: note = XENP42093 Chain 1 - 1D7B4[NKG2D]_H1.25_L1_IgG1_PVA_/S267K

SEQ ID NO: 1945 - protein, 214 aa, synthetic construct; identical to SEQ ID NO: 3
  source 1..214: note = XENP42093 Chain 2 - 1D7B4[NKG2D]_H1.25_L1_IgG1_PVA_/S267K

SEQ ID NO: 1946 - protein, 450 aa, synthetic construct; identical to SEQ ID NO: 965
  source 1..450: note = XENP42094 Chain 1 - 1D7B4[NKG2D]_H1.26_L1_IgG1_PVA_/S267K

SEQ ID NO: 1947 - protein, 214 aa, synthetic construct; identical to SEQ ID NO: 3
  source 1..214: note = XENP42094 Chain 2 - 1D7B4[NKG2D]_H1.26_L1_IgG1_PVA_/S267K

SEQ ID NO: 1948 - protein, 450 aa, synthetic construct; identical to SEQ ID NO: 966
  source 1..450: note = XENP42095 Chain 1 - 1D7B4[NKG2D]_H1.27_L1_IgG1_PVA_/S267K

SEQ ID NO: 1949 - protein, 214 aa, synthetic construct; identical to SEQ ID NO: 3
  source 1..214: note = XENP42095 Chain 2 - 1D7B4[NKG2D]_H1.27_L1_IgG1_PVA_/S267K

SEQ ID NO: 1950 - protein, 450 aa, synthetic construct; identical to SEQ ID NO: 967
  source 1..450: note = XENP42096 Chain 1 - 1D7B4[NKG2D]_H1.28_L1_IgG1_PVA_/S267K

SEQ ID NO: 1951 - protein, 214 aa, synthetic construct; identical to SEQ ID NO: 3
  source 1..214: note = XENP42096 Chain 2 - 1D7B4[NKG2D]_H1.28_L1_IgG1_PVA_/S267K

SEQ ID NO: 1952 - protein, 450 aa, synthetic construct; identical to SEQ ID NO: 968
  source 1..450: note = XENP42097 Chain 1 - 1D7B4[NKG2D]_H1.29_L1_IgG1_PVA_/S267K

SEQ ID NO: 1953 - protein, 214 aa, synthetic construct; identical to SEQ ID NO: 3
  source 1..214: note = XENP42097 Chain 2 - 1D7B4[NKG2D]_H1.29_L1_IgG1_PVA_/S267K

SEQ ID NO: 1954 - protein, 450 aa, synthetic construct; identical to SEQ ID NO: 969
  source 1..450: note = XENP42098 Chain 1 - 1D7B4[NKG2D]_H1.30_L1_IgG1_PVA_/S267K

SEQ ID NO: 1955 - protein, 214 aa, synthetic construct; identical to SEQ ID NO: 3
  source 1..214: note = XENP42098 Chain 2 - 1D7B4[NKG2D]_H1.30_L1_IgG1_PVA_/S267K

SEQ ID NO: 1956 - protein, 450 aa, synthetic construct; identical to SEQ ID NO: 970
  source 1..450: note = XENP42099 Chain 1 - 1D7B4[NKG2D]_H1.31_L1_IgG1_PVA_/S267K

SEQ ID NO: 1957 - protein, 214 aa, synthetic construct; identical to SEQ ID NO: 3
  source 1..214: note = XENP42099 Chain 2 - 1D7B4[NKG2D]_H1.31_L1_IgG1_PVA_/S267K

SEQ ID NO: 1958 - protein, 450 aa, synthetic construct; identical to SEQ ID NO: 971
  source 1..450: note = XENP42100 Chain 1 - 1D7B4[NKG2D]_H1.32_L1_IgG1_PVA_/S267K

SEQ ID NO: 1959 - protein, 214 aa, synthetic construct; identical to SEQ ID NO: 3
  source 1..214: note = XENP42100 Chain 2 - 1D7B4[NKG2D]_H1.32_L1_IgG1_PVA_/S267K

SEQ ID NO: 1960 - protein, 450 aa, synthetic construct; identical to SEQ ID NO: 972
  source 1..450: note = XENP42101 Chain 1 - 1D7B4[NKG2D]_H1.33_L1_IgG1_PVA_/S267K

SEQ ID NO: 1961 - protein, 214 aa, synthetic construct; identical to SEQ ID NO: 3
  source 1..214: note = XENP42101 Chain 2 - 1D7B4[NKG2D]_H1.33_L1_IgG1_PVA_/S267K

SEQ ID NO: 1962 - protein, 450 aa, synthetic construct; identical to SEQ ID NO: 973
  source 1..450: note = XENP42102 Chain 1 - 1D7B4[NKG2D]_H1.34_L1_IgG1_PVA_/S267K

SEQ ID NO: 1963 - protein, 214 aa, synthetic construct; identical to SEQ ID NO: 3
  source 1..214: note = XENP42102 Chain 2 - 1D7B4[NKG2D]_H1.34_L1_IgG1_PVA_/S267K

SEQ ID NO: 1964 - protein, 450 aa, synthetic construct; identical to SEQ ID NO: 974
  source 1..450: note = XENP42103 Chain 1 - 1D7B4[NKG2D]_H1.35_L1_IgG1_PVA_/S267K

SEQ ID NO: 1965 - protein, 214 aa, synthetic construct; identical to SEQ ID NO: 3
  source 1..214: note = XENP42103 Chain 2 - 1D7B4[NKG2D]_H1.35_L1_IgG1_PVA_/S267K

SEQ ID NO: 1966 - protein, 450 aa, synthetic construct; identical to SEQ ID NO: 975
  source 1..450: note = XENP42104 Chain 1 - 1D7B4[NKG2D]_H1.36_L1_IgG1_PVA_/S267K

SEQ ID NO: 1967 - protein, 214 aa, synthetic construct; identical to SEQ ID NO: 3
  source 1..214: note = XENP42104 Chain 2 - 1D7B4[NKG2D]_H1.36_L1_IgG1_PVA_/S267K

SEQ ID NO: 1968 - protein, 450 aa, synthetic construct; identical to SEQ ID NO: 976
  source 1..450: note = XENP42105 Chain 1 - 1D7B4[NKG2D]_H1.37_L1_IgG1_PVA_/S267K

SEQ ID NO: 1969 - protein, 214 aa, synthetic construct; identical to SEQ ID NO: 3
  source 1..214: note = XENP42105 Chain 2 - 1D7B4[NKG2D]_H1.37_L1_IgG1_PVA_/S267K

SEQ ID NO: 1970 - protein, 450 aa, synthetic construct; identical to SEQ ID NO: 977
  source 1..450: note = XENP42106 Chain 1 - 1D7B4[NKG2D]_H1.38_L1_IgG1_PVA_/S267K

SEQ ID NO: 1971 - protein, 214 aa, synthetic construct; identical to SEQ ID NO: 3
  source 1..214: note = XENP42106 Chain 2 - 1D7B4[NKG2D]_H1.38_L1_IgG1_PVA_/S267K

SEQ ID NO: 1972 - protein, 450 aa, synthetic construct; identical to SEQ ID NO: 978
  source 1..450: note = XENP42107 Chain 1 - 1D7B4[NKG2D]_H1.39_L1_IgG1_PVA_/S267K

SEQ ID NO: 1973 - protein, 214 aa, synthetic construct; identical to SEQ ID NO: 3
  source 1..214: note = XENP42107 Chain 2 - 1D7B4[NKG2D]_H1.39_L1_IgG1_PVA_/S267K

SEQ ID NO: 1974 - protein, 450 aa, synthetic construct; identical to SEQ ID NO: 979
  source 1..450: note = XENP42108 Chain 1 - 1D7B4[NKG2D]_H1.40_L1_IgG1_PVA_/S267K

SEQ ID NO: 1975 - protein, 214 aa, synthetic construct; identical to SEQ ID NO: 3
  source 1..214: note = XENP42108 Chain 2 - 1D7B4[NKG2D]_H1.40_L1_IgG1_PVA_/S267K

SEQ ID NO: 1976 - protein, 450 aa, synthetic construct; identical to SEQ ID NO: 980
  source 1..450: note = XENP42109 Chain 1 - 1D7B4[NKG2D]_H1.41_L1_IgG1_PVA_/S267K

SEQ ID NO: 1977 - protein, 214 aa, synthetic construct; identical to SEQ ID NO: 3
  source 1..214: note = XENP42109 Chain 2 - 1D7B4[NKG2D]_H1.41_L1_IgG1_PVA_/S267K

SEQ ID NO: 1978 - protein, 450 aa, synthetic construct; identical to SEQ ID NO: 981
  source 1..450: note = XENP42110 Chain 1 - 1D7B4[NKG2D]_H1.42_L1_IgG1_PVA_/S267K

SEQ ID NO: 1979 - protein, 214 aa, synthetic construct; identical to SEQ ID NO: 3
  source 1..214: note = XENP42110 Chain 2 - 1D7B4[NKG2D]_H1.42_L1_IgG1_PVA_/S267K

SEQ ID NO: 1980 - protein, 450 aa, synthetic construct; identical to SEQ ID NO: 982
  source 1..450: note = XENP42111 Chain 1 - 1D7B4[NKG2D]_H1.43_L1_IgG1_PVA_/S267K

SEQ ID NO: 1981 - protein, 214 aa, synthetic construct; identical to SEQ ID NO: 3
  source 1..214: note = XENP42111 Chain 2 - 1D7B4[NKG2D]_H1.43_L1_IgG1_PVA_/S267K

SEQ ID NO: 1982 - protein, 450 aa, synthetic construct; identical to SEQ ID NO: 983
  source 1..450: note = XENP42112 Chain 1 - 1D7B4[NKG2D]_H1.44_L1_IgG1_PVA_/S267K

SEQ ID NO: 1983 - protein, 214 aa, synthetic construct; identical to SEQ ID NO: 3
  source 1..214: note = XENP42112 Chain 2 - 1D7B4[NKG2D]_H1.44_L1_IgG1_PVA_/S267K

SEQ ID NO: 1984 - protein, 450 aa, synthetic construct; identical to SEQ ID NO: 984
  source 1..450: note = XENP42113 Chain 1 - 1D7B4[NKG2D]_H1.45_L1_IgG1_PVA_/S267K

SEQ ID NO: 1985 - protein, 214 aa, synthetic construct; identical to SEQ ID NO: 3
  source 1..214: note = XENP42113 Chain 2 - 1D7B4[NKG2D]_H1.45_L1_IgG1_PVA_/S267K

SEQ ID NO: 1986 - protein, 450 aa, synthetic construct; identical to SEQ ID NO: 985
  source 1..450: note = XENP42114 Chain 1 - 1D7B4[NKG2D]_H1.46_L1_IgG1_PVA_/S267K

SEQ ID NO: 1987 - protein, 214 aa, synthetic construct; identical to SEQ ID NO: 3
  source 1..214: note = XENP42114 Chain 2 - 1D7B4[NKG2D]_H1.46_L1_IgG1_PVA_/S267K

SEQ ID NO: 1988 - protein, 450 aa, synthetic construct; identical to SEQ ID NO: 986
  source 1..450: note = XENP42115 Chain 1 - 1D7B4[NKG2D]_H1.47_L1_IgG1_PVA_/S267K

SEQ ID NO: 1989 - protein, 214 aa, synthetic construct; identical to SEQ ID NO: 3
  source 1..214: note = XENP42115 Chain 2 - 1D7B4[NKG2D]_H1.47_L1_IgG1_PVA_/S267K

SEQ ID NO: 1990 - protein, 450 aa, synthetic construct; identical to SEQ ID NO: 987
  source 1..450: note = XENP42116 Chain 1 - 1D7B4[NKG2D]_H1.48_L1_IgG1_PVA_/S267K

SEQ ID NO: 1991 - protein, 214 aa, synthetic construct; identical to SEQ ID NO: 3
  source 1..214: note = XENP42116 Chain 2 - 1D7B4[NKG2D]_H1.48_L1_IgG1_PVA_/S267K

SEQ ID NO: 1992 - protein, 451 aa, synthetic construct
  source 1..451: note = XENP42323 Chain 1 - ADI27749_A49[NKG2D]_replica_H0.1_L0_Fab-DF_enoblituzumab[B7 H3]_replica_L0H0_(G4S)4_scFv-DF_IgG1.1-DF_IgG1.2
EVQLVESGGGLVKPGGSLRLSCAASGFTFSSYSMNWVRQAPGKGLEWVSSISSSSSYIYYADSVKGRFTISRDNAKNSLYLQMNSLRAEDTAVYYCARGAPIGAAAGWFDPWGQGTLVTVSSASTKGPSVFPLAPSSKSTSGGTAALGCLVKDYFPEPVTVSWNSGALTSGVHTFPAVLQSSGLYSLSSVVTVPSSSLGTQTYICNVNHKPSNTKVDKKVEPKSCDKTHTCPPCPAPELLGGPSVFLFPPKPKDTLMISRTPEVTCVVVDVSHEDPEVKFNWYVDGVEVHNAKTKPREEQYNSTYRVVSVLTVLHQDWLNGKEYKCKVSNKALPAPIEKTISKAKGQPREPQVCTLPPSRDELTENQVSLTCLVKGFYPSDIAVEWESNGQPENNYKTTPPVLDSDGSFFLYSWLTVDKSRWQQGNVFSCSVMHEALHNHYTQKSLSLSPG

SEQ ID NO: 1993 - protein, 477 aa, synthetic construct
  source 1..477: note = XENP42323 Chain 2 - ADI27749_A49[NKG2D]_replica_H0.1_L0_Fab-DF_enoblituzumab[B7 H3]_replica_L0H0_(G4S)4_scFv-DF_IgG1.1-DF_IgG1.2
DIQLTQSPSFLSASVGDRVTITCKASQNVDTNVAWYQQKPGKAPKALIYSASYRYSGVPSRFSGSGSGTDFTLTISSLQPEDFATYYCQQYNNYPFTFGCGTKLEIKGGGGSGGGGSGGGGSGGGGSEVQLVESGGGLVQPGGSLRLSCAASGFTFSSFGMHWVRQAPGKCLEWVAYISSDSSAIYYADTVKGRFTISRDNAKNSLYLQMNSLRDEDTAVYYCGRGRENIYYGSRLDYWGQGTTVTVSSASDKTHTCPPCPAPELLGGPSVFLFPPKPKDTLMISRTPEVTCVVVDVSHEDPEVKFNWYVDGVEVHNAKTKPREEQYNSTYRVVSVLTVLHQDWLNGKEYKCKVSNKALPAPIEKTISKAKGQPREPRVYTLPPCRDELTKNQVSLTCLVKGFYPSDIAVEWESNGQPENNYKTTPPVLVSDGSFTLYSKLTVDKSRWQQGNVFSCSVMHEALHNHYTQKSLSLSPG

SEQ ID NO: 1994 - protein, 214 aa, synthetic construct; identical to SEQ ID NO: 176
  source 1..214: note = XENP42323 Chain 3 - ADI27749_A49[NKG2D]_replica_H0.1_L0_Fab-DF_enoblituzumab[B7 H3]_replica_L0H0_(G4S)4_scFv-DF_IgG1.1-DF_IgG1.2

SEQ ID NO: 1995 - protein, 449 aa, synthetic construct
  source 1..449: note = XENP42583 Chain 1 - Numax[RSV]_H1L1_Fab-1D7B4[NKG2D]_H1L1_scFv(GKPGS)4-IgG1_pI( -)_Isosteric_A_PVA_/S267K/L368D/K370S-Fc(216)_IgG1_C220S/PV A_/S267K/S364K/E357Q
QVTLRESGPALVKPTQTLTLTCTFSGFSLSTAGMSVGWIRQPPGKALEWLADIWWDDKKHYNPSLKDRLTISKDTSKNQVVLKVTNMDPADTATYYCARDMIFNFYFDVWGQGTTVTVSSASTKGPSVFPLAPSSKSTSGGTAALGCLVKDYFPEPVTVSWNSGALTSGVHTFPAVLQSSGLYSLSSVVTVPSSSLGTQTYICNVNHKPSDTKVDKKVEPKSCDKTHTCPPCPAPPVAGPSVFLFPPKPKDTLMISRTPEVTCVVVDVKHEDPEVKFNWYVDGVEVHNAKTKPREEEYNSTYRVVSVLTVLHQDWLNGKEYKCKVSNKALPAPIEKTISKAKGQPREPQVYTLPPSREEMTKNQVSLTCDVSGFYPSDIAVEWESDGQPENNYKTTPPVLDSDGSFFLYSKLTVDKSRWEQGDVFSCSVMHEALHNHYTQKSLSLSPGK

SEQ ID NO: 1996 - protein, 479 aa, synthetic construct; identical to SEQ ID NO: 1039
  source 1..479: note = XENP42583 Chain 2 - Numax[RSV]_H1L1_Fab-1D7B4[NKG2D]_H1L1_scFv(GKPGS)4-IgG1_pI( -)_Isosteric_A_PVA_/S267K/L368D/K370S-Fc(216)_IgG1_C220S/PV A_/S267K/S364K/E357Q

SEQ ID NO: 1997 - protein, 213 aa, synthetic construct; identical to SEQ ID NO: 171
  source 1..213: note = XENP42583 Chain 3 - Numax[RSV]_H1L1_Fab-1D7B4[NKG2D]_H1L1_scFv(GKPGS)4-IgG1_pI( -)_Isosteric_A_PVA_/S267K/L368D/K370S-Fc(216)_IgG1_C220S/PV A_/S267K/S364K/E357Q

SEQ ID NO: 1998 - protein, 450 aa, synthetic construct
  source 1..450: note = XENP42584 Chain 1 - Numax[RSV]_H1L1_Fab-1D7B4[NKG2D]_H1L1_scFv(GKPGS)4-IgG1_pI( -)_Isosteric_A_L368D/K370S-Fc(216)_IgG1_C220S/S364K/E357Q
QVTLRESGPALVKPTQTLTLTCTFSGFSLSTAGMSVGWIRQPPGKALEWLADIWWDDKKHYNPSLKDRLTISKDTSKNQVVLKVTNMDPADTATYYCARDMIFNFYFDVWGQGTTVTVSSASTKGPSVFPLAPSSKSTSGGTAALGCLVKDYFPEPVTVSWNSGALTSGVHTFPAVLQSSGLYSLSSVVTVPSSSLGTQTYICNVNHKPSDTKVDKKVEPKSCDKTHTCPPCPAPELLGGPSVFLFPPKPKDTLMISRTPEVTCVVVDVSHEDPEVKFNWYVDGVEVHNAKTKPREEEYNSTYRVVSVLTVLHQDWLNGKEYKCKVSNKALPAPIEKTISKAKGQPREPQVYTLPPSREEMTKNQVSLTCDVSGFYPSDIAVEWESDGQPENNYKTTPPVLDSDGSFFLYSKLTVDKSRWEQGDVFSCSVMHEALHNHYTQKSLSLSPGK

SEQ ID NO: 1999 - protein, 480 aa, synthetic construct; identical to SEQ ID NO: 1037
  source 1..480: note = XENP42584 Chain 2 - Numax[RSV]_H1L1_Fab-1D7B4[NKG2D]_H1L1_scFv(GKPGS)4-IgG1_pI( -)_Isosteric_A_L368D/K370S-Fc(216)_IgG1_C220S/S364K/E357Q

SEQ ID NO: 2000 - protein, 213 aa, synthetic construct; identical to SEQ ID NO: 171
  source 1..213: note = XENP42584 Chain 3 - Numax[RSV]_H1L1_Fab-1D7B4[NKG2D]_H1L1_scFv(GKPGS)4-IgG1_pI( -)_Isosteric_A_L368D/K370S-Fc(216)_IgG1_C220S/S364K/E357Q

SEQ ID NO: 2001 - protein, 450 aa, synthetic construct
  source 1..450: note = XENP42585 Chain 1 - Numax[RSV]_H1L1_Fab-1D7B4[NKG2D]_H1L1_scFv(GKPGS)4-IgG1_pI( -)_Isosteric_A_S239D/L368D/K370S-Fc(216)_IgG1_C220S/S239D/S 364K/E357Q
QVTLRESGPALVKPTQTLTLTCTFSGFSLSTAGMSVGWIRQPPGKALEWLADIWWDDKKHYNPSLKDRLTISKDTSKNQVVLKVTNMDPADTATYYCARDMIFNFYFDVWGQGTTVTVSSASTKGPSVFPLAPSSKSTSGGTAALGCLVKDYFPEPVTVSWNSGALTSGVHTFPAVLQSSGLYSLSSVVTVPSSSLGTQTYICNVNHKPSDTKVDKKVEPKSCDKTHTCPPCPAPELLGGPDVFLFPPKPKDTLMISRTPEVTCVVVDVSHEDPEVKFNWYVDGVEVHNAKTKPREEEYNSTYRVVSVLTVLHQDWLNGKEYKCKVSNKALPAPIEKTISKAKGQPREPQVYTLPPSREEMTKNQVSLTCDVSGFYPSDIAVEWESDGQPENNYKTTPPVLDSDGSFFLYSKLTVDKSRWEQGDVFSCSVMHEALHNHYTQKSLSLSPGK

SEQ ID NO: 2002 - protein, 480 aa, synthetic construct
  source 1..480: note = XENP42585 Chain 2 - Numax[RSV]_H1L1_Fab-1D7B4[NKG2D]_H1L1_scFv(GKPGS)4-IgG1_pI( -)_Isosteric_A_S239D/L368D/K370S-Fc(216)_IgG1_C220S/S239D/S 364K/E357Q
EVQLLESGGGLVQPGGSLRLSCAASGFTFSSYAMSWVRQAPGKGLEWVSSISASGGSTYYADSVKGRFTISRDNSKNTLYLQMNSLRAEDTAVYYCAKGIFSIYFFYFDYWGQGTLVTVSSGKPGSGKPGSGKPGSGKPGSDIQMTQSPSSLSASVGDRVTITCRASQSISSYLNWYQQKPGKAPKLLIYAASSLQSGVPSRFSGSGSGTDFTLTISSLQPEDFATYYCQQSYSTPYTFGQGTKLEIKEPKSSDKTHTCPPCPAPELLGGPDVFLFPPKPKDTLMISRTPEVTCVVVDVSHEDPEVKFNWYVDGVEVHNAKTKPREEQYNSTYRVVSVLTVLHQDWLNGKEYKCKVSNKALPAPIEKTISKAKGQPREPQVYTLPPSREQMTKNQVKLTCLVKGFYPSDIAVEWESNGQPENNYKTTPPVLDSDGSFFLYSKLTVDKSRWQQGNVFSCSVMHEALHNHYTQKSLSLSPGK

SEQ ID NO: 2003 - protein, 213 aa, synthetic construct; identical to SEQ ID NO: 171
  source 1..213: note = XENP42585 Chain 3 - Numax[RSV]_H1L1_Fab-1D7B4[NKG2D]_H1L1_scFv(GKPGS)4-IgG1_pI( -)_Isosteric_A_S239D/L368D/K370S-Fc(216)_IgG1_C220S/S239D/S 364K/E357Q

SEQ ID NO: 2004 - protein, 450 aa, synthetic construct
  source 1..450: note = XENP42586 Chain 1 - Numax[RSV]_H1L1_Fab-1D7B4[NKG2D]_H1L1_scFv(GKPGS)4-IgG1_pI( -)_Isosteric_A_I332E/L368D/K370S-Fc(216)_IgG1_C220S/S239D/S 364K/E357Q
QVTLRESGPALVKPTQTLTLTCTFSGFSLSTAGMSVGWIRQPPGKALEWLADIWWDDKKHYNPSLKDRLTISKDTSKNQVVLKVTNMDPADTATYYCARDMIFNFYFDVWGQGTTVTVSSASTKGPSVFPLAPSSKSTSGGTAALGCLVKDYFPEPVTVSWNSGALTSGVHTFPAVLQSSGLYSLSSVVTVPSSSLGTQTYICNVNHKPSDTKVDKKVEPKSCDKTHTCPPCPAPELLGGPSVFLFPPKPKDTLMISRTPEVTCVVVDVSHEDPEVKFNWYVDGVEVHNAKTKPREEEYNSTYRVVSVLTVLHQDWLNGKEYKCKVSNKALPAPEEKTISKAKGQPREPQVYTLPPSREEMTKNQVSLTCDVSGFYPSDIAVEWESDGQPENNYKTTPPVLDSDGSFFLYSKLTVDKSRWEQGDVFSCSVMHEALHNHYTQKSLSLSPGK

SEQ ID NO: 2005 - protein, 480 aa, synthetic construct; identical to SEQ ID NO: 2002
  source 1..480: note = XENP42586 Chain 2 - Numax[RSV]_H1L1_Fab-1D7B4[NKG2D]_H1L1_scFv(GKPGS)4-IgG1_pI( -)_Isosteric_A_I332E/L368D/K370S-Fc(216)_IgG1_C220S/S239D/S 364K/E357Q

SEQ ID NO: 2006 - protein, 213 aa, synthetic construct; identical to SEQ ID NO: 171
  source 1..213: note = XENP42586 Chain 3 - Numax[RSV]_H1L1_Fab-1D7B4[NKG2D]_H1L1_scFv(GKPGS)4-IgG1_pI( -)_Isosteric_A_I332E/L368D/K370S-Fc(216)_IgG1_C220S/S239D/S 364K/E357Q

SEQ ID NO: 2007 - protein, 450 aa, synthetic construct; identical to SEQ ID NO: 170
  source 1..450: note = XENP42587 Chain 1 - Numax[RSV]_H1L1_Fab-1D7B4[NKG2D]_H1L1_scFv(GKPGS)4-IgG1_pI( -)_Isosteric_A_S239D/I332E/L368D/K370S-Fc(216)_IgG1_C220S/S 239D/I332E/S364K/E357Q

SEQ ID NO: 2008 - protein, 480 aa, synthetic construct; identical to SEQ ID NO: 5
  source 1..480: note = XENP42587 Chain 2 - Numax[RSV]_H1L1_Fab-1D7B4[NKG2D]_H1L1_scFv(GKPGS)4-IgG1_pI( -)_Isosteric_A_S239D/I332E/L368D/K370S-Fc(216)_IgG1_C220S/S 239D/I332E/S364K/E357Q

SEQ ID NO: 2009 - protein, 213 aa, synthetic construct; identical to SEQ ID NO: 171
  source 1..213: note = XENP42587 Chain 3 - Numax[RSV]_H1L1_Fab-1D7B4[NKG2D]_H1L1_scFv(GKPGS)4-IgG1_pI( -)_Isosteric_A_S239D/I332E/L368D/K370S-Fc(216)_IgG1_C220S/S 239D/I332E/S364K/E357Q

SEQ ID NO: 2010 - protein, 449 aa, synthetic construct; identical to SEQ ID NO: 1995
  source 1..449: note = XENP42588 Chain 1 - Numax[RSV]_H1L1_Fab-Numax[RSV]_H1L1_Fab-IgG1_pI(-)_Isosteri c_A_PVA_/S267K/L368D/K370S-IgG1_PVA_/S267K/S364K/E357Q/K447 del_(G4S)3_1D7B4[NKG2D]_H1_L1_scFv(GKPGS)4

SEQ ID NO: 2011 - protein, 711 aa, synthetic construct
  source 1..711: note = XENP42588 Chain 2 - Numax[RSV]_H1L1_Fab-Numax[RSV]_H1L1_Fab-IgG1_pI(-)_Isosteri c_A_PVA_/S267K/L368D/K370S-IgG1_PVA_/S267K/S364K/E357Q/K447 del_(G4S)3_1D7B4[NKG2D]_H1_L1_scFv(GKPGS)4
QVTLRESGPALVKPTQTLTLTCTFSGFSLSTAGMSVGWIRQPPGKALEWLADIWWDDKKHYNPSLKDRLTISKDTSKNQVVLKVTNMDPADTATYYCARDMIFNFYFDVWGQGTTVTVSSASTKGPSVFPLAPSSKSTSGGTAALGCLVKDYFPEPVTVSWNSGALTSGVHTFPAVLQSSGLYSLSSVVTVPSSSLGTQTYICNVNHKPSNTKVDKKVEPKSCDKTHTCPPCPAPPVAGPSVFLFPPKPKDTLMISRTPEVTCVVVDVKHEDPEVKFNWYVDGVEVHNAKTKPREEQYNSTYRVVSVLTVLHQDWLNGKEYKCKVSNKALPAPIEKTISKAKGQPREPQVYTLPPSREQMTKNQVKLTCLVKGFYPSDIAVEWESNGQPENNYKTTPPVLDSDGSFFLYSKLTVDKSRWQQGNVFSCSVMHEALHNHYTQKSLSLSPGGGGGSGGGGSGGGGSEVQLLESGGGLVQPGGSLRLSCAASGFTFSSYAMSWVRQAPGKGLEWVSSISASGGSTYYADSVKGRFTISRDNSKNTLYLQMNSLRAEDTAVYYCAKGIFSIYFFYFDYWGQGTLVTVSSGKPGSGKPGSGKPGSGKPGSDIQMTQSPSSLSASVGDRVTITCRASQSISSYLNWYQQKPGKAPKLLIYAASSLQSGVPSRFSGSGSGTDFTLTISSLQPEDFATYYCQQSYSTPYTFGQGTKLEIK

SEQ ID NO: 2012 - protein, 213 aa, synthetic construct; identical to SEQ ID NO: 171
  source 1..213: note = XENP42588 Chain 3 - Numax[RSV]_H1L1_Fab-Numax[RSV]_H1L1_Fab-IgG1_pI(-)_Isosteri c_A_PVA_/S267K/L368D/K370S-IgG1_PVA_/S267K/S364K/E357Q/K447 del_(G4S)3_1D7B4[NKG2D]_H1_L1_scFv(GKPGS)4

SEQ ID NO: 2013 - protein, 450 aa, synthetic construct; identical to SEQ ID NO: 1998
  source 1..450: note = XENP42589 Chain 1 - Numax[RSV]_H1L1_Fab-Numax[RSV]_H1L1_Fab-IgG1_pI(-)_Isosteri c_A_L368D/K370S-IgG1_S364K/E357Q/K447del_(G4S)3_1D7B4[NKG2D ]_H1_L1_scFv(GKPGS)4

SEQ ID NO: 2014 - protein, 712 aa, synthetic construct
  source 1..712: note = XENP42589 Chain 2 - Numax[RSV]_H1L1_Fab-Numax[RSV]_H1L1_Fab-IgG1_pI(-)_Isosteri c_A_L368D/K370S-IgG1_S364K/E357Q/K447del_(G4S)3_1D7B4[NKG2D ]_H1_L1_scFv(GKPGS)4
QVTLRESGPALVKPTQTLTLTCTFSGFSLSTAGMSVGWIRQPPGKALEWLADIWWDDKKHYNPSLKDRLTISKDTSKNQVVLKVTNMDPADTATYYCARDMIFNFYFDVWGQGTTVTVSSASTKGPSVFPLAPSSKSTSGGTAALGCLVKDYFPEPVTVSWNSGALTSGVHTFPAVLQSSGLYSLSSVVTVPSSSLGTQTYICNVNHKPSNTKVDKKVEPKSCDKTHTCPPCPAPELLGGPSVFLFPPKPKDTLMISRTPEVTCVVVDVSHEDPEVKFNWYVDGVEVHNAKTKPREEQYNSTYRVVSVLTVLHQDWLNGKEYKCKVSNKALPAPIEKTISKAKGQPREPQVYTLPPSREQMTKNQVKLTCLVKGFYPSDIAVEWESNGQPENNYKTTPPVLDSDGSFFLYSKLTVDKSRWQQGNVFSCSVMHEALHNHYTQKSLSLSPGGGGGSGGGGSGGGGSEVQLLESGGGLVQPGGSLRLSCAASGFTFSSYAMSWVRQAPGKGLEWVSSISASGGSTYYADSVKGRFTISRDNSKNTLYLQMNSLRAEDTAVYYCAKGIFSIYFFYFDYWGQGTLVTVSSGKPGSGKPGSGKPGSGKPGSDIQMTQSPSSLSASVGDRVTITCRASQSISSYLNWYQQKPGKAPKLLIYAASSLQSGVPSRFSGSGSGTDFTLTISSLQPEDFATYYCQQSYSTPYTFGQGTKLEIK

SEQ ID NO: 2015 - protein, 213 aa, synthetic construct; identical to SEQ ID NO: 171
  source 1..213: note = XENP42589 Chain 3 - Numax[RSV]_H1L1_Fab-Numax[RSV]_H1L1_Fab-IgG1_pI(-)_Isosteri c_A_L368D/K370S-IgG1_S364K/E357Q/K447del_(G4S)3_1D7B4[NKG2D ]_H1_L1_scFv(GKPGS)4

SEQ ID NO: 2016 - protein, 450 aa, synthetic construct; identical to SEQ ID NO: 2001
  source 1..450: note = XENP42590 Chain 1 - Numax[RSV]_H1L1_Fab-Numax[RSV]_H1L1_Fab-IgG1_pI(-)_Isosteri c_A_S239D/L368D/K370S-IgG1_S239D/S364K/E357Q/K447del_(G4S)3 _1D7B4[NKG2D]_H1_L1_scFv(GKPGS)4

SEQ ID NO: 2017 - protein, 712 aa, synthetic construct
  source 1..712: note = XENP42590 Chain 2 - Numax[RSV]_H1L1_Fab-Numax[RSV]_H1L1_Fab-IgG1_pI(-)_Isosteri c_A_S239D/L368D/K370S-IgG1_S239D/S364K/E357Q/K447del_(G4S)3 _1D7B4[NKG2D]_H1_L1_scFv(GKPGS)4
QVTLRESGPALVKPTQTLTLTCTFSGFSLSTAGMSVGWIRQPPGKALEWLADIWWDDKKHYNPSLKDRLTISKDTSKNQVVLKVTNMDPADTATYYCARDMIFNFYFDVWGQGTTVTVSSASTKGPSVFPLAPSSKSTSGGTAALGCLVKDYFPEPVTVSWNSGALTSGVHTFPAVLQSSGLYSLSSVVTVPSSSLGTQTYICNVNHKPSNTKVDKKVEPKSCDKTHTCPPCPAPELLGGPDVFLFPPKPKDTLMISRTPEVTCVVVDVSHEDPEVKFNWYVDGVEVHNAKTKPREEQYNSTYRVVSVLTVLHQDWLNGKEYKCKVSNKALPAPIEKTISKAKGQPREPQVYTLPPSREQMTKNQVKLTCLVKGFYPSDIAVEWESNGQPENNYKTTPPVLDSDGSFFLYSKLTVDKSRWQQGNVFSCSVMHEALHNHYTQKSLSLSPGGGGGSGGGGSGGGGSEVQLLESGGGLVQPGGSLRLSCAASGFTFSSYAMSWVRQAPGKGLEWVSSISASGGSTYYADSVKGRFTISRDNSKNTLYLQMNSLRAEDTAVYYCAKGIFSIYFFYFDYWGQGTLVTVSSGKPGSGKPGSGKPGSGKPGSDIQMTQSPSSLSASVGDRVTITCRASQSISSYLNWYQQKPGKAPKLLIYAASSLQSGVPSRFSGSGSGTDFTLTISSLQPEDFATYYCQQSYSTPYTFGQGTKLEIK

SEQ ID NO: 2018 - protein, 213 aa, synthetic construct; identical to SEQ ID NO: 171
  source 1..213: note = XENP42590 Chain 3 - Numax[RSV]_H1L1_Fab-Numax[RSV]_H1L1_Fab-IgG1_pI(-)_Isosteri c_A_S239D/L368D/K370S-IgG1_S239D/S364K/E357Q/K447del_(G4S)3 _1D7B4[NKG2D]_H1_L1_scFv(GKPGS)4

SEQ ID NO: 2019 - protein, 450 aa, synthetic construct; identical to SEQ ID NO: 2004
  source 1..450: note = XENP42591 Chain 1 - Numax[RSV]_H1L1_Fab-Numax[RSV]_H1L1_Fab-IgG1_pI(-)_Isosteri c_A_I332E/L368D/K370S-IgG1_S239D/S364K/E357Q/K447del_(G4S)3 _1D7B4[NKG2D]_H1_L1_scFv(GKPGS)4

SEQ ID NO: 2020 - protein, 712 aa, synthetic construct; identical to SEQ ID NO: 2017
  source 1..712: note = XENP42591 Chain 2 - Numax[RSV]_H1L1_Fab-Numax[RSV]_H1L1_Fab-IgG1_pI(-)_Isosteri c_A_I332E/L368D/K370S-IgG1_S239D/S364K/E357Q/K447del_(G4S)3 _1D7B4[NKG2D]_H1_L1_scFv(GKPGS)4

SEQ ID NO: 2021 - protein, 213 aa, synthetic construct; identical to SEQ ID NO: 171
  source 1..213: note = XENP42591 Chain 3 - Numax[RSV]_H1L1_Fab-Numax[RSV]_H1L1_Fab-IgG1_pI(-)_Isosteri c_A_I332E/L368D/K370S-IgG1_S239D/S364K/E357Q/K447del_(G4S)3 _1D7B4[NKG2D]_H1_L1_scFv(GKPGS)4

SEQ ID NO: 2022 - protein, 450 aa, synthetic construct; identical to SEQ ID NO: 170
  source 1..450: note = XENP42592 Chain 1 - Numax[RSV]_H1L1_Fab-Numax[RSV]_H1L1_Fab-IgG1_pI(-)_Isosteri c_A_S239D/I332E/L368D/K370S-IgG1_S239D/I332E/S364K/E357Q/K4 47del_(G4S)3_1D7B4[NKG2D]_H1_L1_scFv(GKPGS)4

SEQ ID NO: 2023 - protein, 712 aa, synthetic construct
  source 1..712: note = XENP42592 Chain 2 - Numax[RSV]_H1L1_Fab-Numax[RSV]_H1L1_Fab-IgG1_pI(-)_Isosteri c_A_S239D/I332E/L368D/K370S-IgG1_S239D/I332E/S364K/E357Q/K4 47del_(G4S)3_1D7B4[NKG2D]_H1_L1_scFv(GKPGS)4
QVTLRESGPALVKPTQTLTLTCTFSGFSLSTAGMSVGWIRQPPGKALEWLADIWWDDKKHYNPSLKDRLTISKDTSKNQVVLKVTNMDPADTATYYCARDMIFNFYFDVWGQGTTVTVSSASTKGPSVFPLAPSSKSTSGGTAALGCLVKDYFPEPVTVSWNSGALTSGVHTFPAVLQSSGLYSLSSVVTVPSSSLGTQTYICNVNHKPSNTKVDKKVEPKSCDKTHTCPPCPAPELLGGPDVFLFPPKPKDTLMISRTPEVTCVVVDVSHEDPEVKFNWYVDGVEVHNAKTKPREEQYNSTYRVVSVLTVLHQDWLNGKEYKCKVSNKALPAPEEKTISKAKGQPREPQVYTLPPSREQMTKNQVKLTCLVKGFYPSDIAVEWESNGQPENNYKTTPPVLDSDGSFFLYSKLTVDKSRWQQGNVFSCSVMHEALHNHYTQKSLSLSPGGGGGSGGGGSGGGGSEVQLLESGGGLVQPGGSLRLSCAASGFTFSSYAMSWVRQAPGKGLEWVSSISASGGSTYYADSVKGRFTISRDNSKNTLYLQMNSLRAEDTAVYYCAKGIFSIYFFYFDYWGQGTLVTVSSGKPGSGKPGSGKPGSGKPGSDIQMTQSPSSLSASVGDRVTITCRASQSISSYLNWYQQKPGKAPKLLIYAASSLQSGVPSRFSGSGSGTDFTLTISSLQPEDFATYYCQQSYSTPYTFGQGTKLEIK

SEQ ID NO: 2024 - protein, 213 aa, synthetic construct; identical to SEQ ID NO: 171
  source 1..213: note = XENP42592 Chain 3 - Numax[RSV]_H1L1_Fab-Numax[RSV]_H1L1_Fab-IgG1_pI(-)_Isosteri c_A_S239D/I332E/L368D/K370S-IgG1_S239D/I332E/S364K/E357Q/K4 47del_(G4S)3_1D7B4[NKG2D]_H1_L1_scFv(GKPGS)4

SEQ ID NO: 2025 - protein, 447 aa, synthetic construct; identical to SEQ ID NO: 988
  source 1..447: note = XENP42657 Chain 1 - 38E2[B7H3]_H2_L1.1_Fab-1D7B4[NKG2D]_H1.42_L1_scFv(GKPGS)4-I gG1_pI(-)_Isosteric_A_L368D/K370S-Fc(216)_IgG1_C220S/S364K/ E357Q

SEQ ID NO: 2026 - protein, 480 aa, synthetic construct
  source 1..480: note = XENP42657 Chain 2 - 38E2[B7H3]_H2_L1.1_Fab-1D7B4[NKG2D]_H1.42_L1_scFv(GKPGS)4-I gG1_pI(-)_Isosteric_A_L368D/K370S-Fc(216)_IgG1_C220S/S364K/ E357Q
EVQLLESGGGLVQPGGSLRLSCAASGFTFSSYAMSWVRQAPGKGLEWVSSISASGGSTYYADSVKGRFTISRDNSKNTLYLQMNSLRAEDTAVYYCAKGIFSIYFHYFDYWGQGTLVTVSSGKPGSGKPGSGKPGSGKPGSDIQMTQSPSSLSASVGDRVTITCRASQSISSYLNWYQQKPGKAPKLLIYAASSLQSGVPSRFSGSGSGTDFTLTISSLQPEDFATYYCQQSYSTPYTFGQGTKLEIKEPKSSDKTHTCPPCPAPELLGGPSVFLFPPKPKDTLMISRTPEVTCVVVDVSHEDPEVKFNWYVDGVEVHNAKTKPREEQYNSTYRVVSVLTVLHQDWLNGKEYKCKVSNKALPAPIEKTISKAKGQPREPQVYTLPPSREQMTKNQVKLTCLVKGFYPSDIAVEWESNGQPENNYKTTPPVLDSDGSFFLYSKLTVDKSRWQQGNVFSCSVMHEALHNHYTQKSLSLSPGK

SEQ ID NO: 2027 - protein, 217 aa, synthetic construct; identical to SEQ ID NO: 6
  source 1..217: note = XENP42657 Chain 3 - 38E2[B7H3]_H2_L1.1_Fab-1D7B4[NKG2D]_H1.42_L1_scFv(GKPGS)4-I gG1_pI(-)_Isosteric_A_L368D/K370S-Fc(216)_IgG1_C220S/S364K/ E357Q

SEQ ID NO: 2028 - protein, 447 aa, synthetic construct; identical to SEQ ID NO: 4
  source 1..447: note = XENP42663 Chain 1 - 38E2[B7H3]_H2_L1.1_Fab-1D7B4[NKG2D]_H1.42_L1_scFv(GKPGS)4-I gG1_pI(-)_Isosteric_A_S239D/I332E/L368D/K370S-Fc(216)_IgG1_ C220S/S239D/I332E/S364K/E357Q

SEQ ID NO: 2029 - protein, 480 aa, synthetic construct
  source 1..480: note = XENP42663 Chain 2 - 38E2[B7H3]_H2_L1.1_Fab-1D7B4[NKG2D]_H1.42_L1_scFv(GKPGS)4-I gG1_pI(-)_Isosteric_A_S239D/I332E/L368D/K370S-Fc(216)_IgG1_ C220S/S239D/I332E/S364K/E357Q
EVQLLESGGGLVQPGGSLRLSCAASGFTFSSYAMSWVRQAPGKGLEWVSSISASGGSTYYADSVKGRFTISRDNSKNTLYLQMNSLRAEDTAVYYCAKGIFSIYFHYFDYWGQGTLVTVSSGKPGSGKPGSGKPGSGKPGSDIQMTQSPSSLSASVGDRVTITCRASQSISSYLNWYQQKPGKAPKLLIYAASSLQSGVPSRFSGSGSGTDFTLTISSLQPEDFATYYCQQSYSTPYTFGQGTKLEIKEPKSSDKTHTCPPCPAPELLGGPDVFLFPPKPKDTLMISRTPEVTCVVVDVSHEDPEVKFNWYVDGVEVHNAKTKPREEQYNSTYRVVSVLTVLHQDWLNGKEYKCKVSNKALPAPEEKTISKAKGQPREPQVYTLPPSREQMTKNQVKLTCLVKGFYPSDIAVEWESNGQPENNYKTTPPVLDSDGSFFLYSKLTVDKSRWQQGNVFSCSVMHEALHNHYTQKSLSLSPGK

SEQ ID NO: 2030 - protein, 217 aa, synthetic construct; identical to SEQ ID NO: 6
  source 1..217: note = XENP42663 Chain 3 - 38E2[B7H3]_H2_L1.1_Fab-1D7B4[NKG2D]_H1.42_L1_scFv(GKPGS)4-I gG1_pI(-)_Isosteric_A_S239D/I332E/L368D/K370S-Fc(216)_IgG1_ C220S/S239D/I332E/S364K/E357Q

SEQ ID NO: 2031 - protein, 447 aa, synthetic construct; identical to SEQ ID NO: 988
  source 1..447: note = XENP42664 Chain 1 - 38E2[B7H3]_H2_L1.1_Fab-38E2[B7H3]_H2_L1.1_Fab-IgG1_pI(-)_Is osteric_A_L368D/K370S-IgG1_S364K/E357Q/K447del_(G4S)3_1D7B4 [NKG2D]_H1.3_L1_scFv(GKPGS)4

SEQ ID NO: 2032 - protein, 709 aa, synthetic construct
  source 1..709: note = XENP42664 Chain 2 - 38E2[B7H3]_H2_L1.1_Fab-38E2[B7H3]_H2_L1.1_Fab-IgG1_pI(-)_Is osteric_A_L368D/K370S-IgG1_S364K/E357Q/K447del_(G4S)3_1D7B4 [NKG2D]_H1.3_L1_scFv(GKPGS)4
EVQLLESGGGLVQPGGSLRLSCAVSGFSLSSYGVIWVRQAPGKGLEYVSWVSSGGSTNYASSVKGRFTISRDTSKNTVYLQMNSLRAEDTAVYFCARGATNSGTDIWGPGTLVTVSSASTKGPSVFPLAPSSKSTSGGTAALGCLVKDYFPEPVTVSWNSGALTSGVHTFPAVLQSSGLYSLSSVVTVPSSSLGTQTYICNVNHKPSNTKVDKKVEPKSCDKTHTCPPCPAPELLGGPSVFLFPPKPKDTLMISRTPEVTCVVVDVSHEDPEVKFNWYVDGVEVHNAKTKPREEQYNSTYRVVSVLTVLHQDWLNGKEYKCKVSNKALPAPIEKTISKAKGQPREPQVYTLPPSREQMTKNQVKLTCLVKGFYPSDIAVEWESNGQPENNYKTTPPVLDSDGSFFLYSKLTVDKSRWQQGNVFSCSVMHEALHNHYTQKSLSLSPGGGGGSGGGGSGGGGSEVQLLESGGGLVQPGGSLRLSCAASGFTFSSSAMSWVRQAPGKGLEWVSSISASGGSTYYADSVKGRFTISRDNSKNTLYLQMNSLRAEDTAVYYCAKGIFSIYFFYFDYWGQGTLVTVSSGKPGSGKPGSGKPGSGKPGSDIQMTQSPSSLSASVGDRVTITCRASQSISSYLNWYQQKPGKAPKLLIYAASSLQSGVPSRFSGSGSGTDFTLTISSLQPEDFATYYCQQSYSTPYTFGQGTKLEIK

SEQ ID NO: 2033 - protein, 217 aa, synthetic construct; identical to SEQ ID NO: 6
  source 1..217: note = XENP42664 Chain 3 - 38E2[B7H3]_H2_L1.1_Fab-38E2[B7H3]_H2_L1.1_Fab-IgG1_pI(-)_Is osteric_A_L368D/K370S-IgG1_S364K/E357Q/K447del_(G4S)3_1D7B4 [NKG2D]_H1.3_L1_scFv(GKPGS)4

SEQ ID NO: 2034 - protein, 447 aa, synthetic construct; identical to SEQ ID NO: 988
  source 1..447: note = XENP42665 Chain 1 - 38E2[B7H3]_H2_L1.1_Fab-38E2[B7H3]_H2_L1.1_Fab-IgG1_pI(-)_Is osteric_A_L368D/K370S-IgG1_S364K/E357Q/K447del_(G4S)3_1D7B4 [NKG2D]_H1.23_L1_scFv(GKPGS)4

SEQ ID NO: 2035 - protein, 709 aa, synthetic construct
  source 1..709: note = XENP42665 Chain 2 - 38E2[B7H3]_H2_L1.1_Fab-38E2[B7H3]_H2_L1.1_Fab-IgG1_pI(-)_Is osteric_A_L368D/K370S-IgG1_S364K/E357Q/K447del_(G4S)3_1D7B4 [NKG2D]_H1.23_L1_scFv(GKPGS)4
EVQLLESGGGLVQPGGSLRLSCAVSGFSLSSYGVIWVRQAPGKGLEYVSWVSSGGSTNYASSVKGRFTISRDTSKNTVYLQMNSLRAEDTAVYFCARGATNSGTDIWGPGTLVTVSSASTKGPSVFPLAPSSKSTSGGTAALGCLVKDYFPEPVTVSWNSGALTSGVHTFPAVLQSSGLYSLSSVVTVPSSSLGTQTYICNVNHKPSNTKVDKKVEPKSCDKTHTCPPCPAPELLGGPSVFLFPPKPKDTLMISRTPEVTCVVVDVSHEDPEVKFNWYVDGVEVHNAKTKPREEQYNSTYRVVSVLTVLHQDWLNGKEYKCKVSNKALPAPIEKTISKAKGQPREPQVYTLPPSREQMTKNQVKLTCLVKGFYPSDIAVEWESNGQPENNYKTTPPVLDSDGSFFLYSKLTVDKSRWQQGNVFSCSVMHEALHNHYTQKSLSLSPGGGGGSGGGGSGGGGSEVQLLESGGGLVQPGGSLRLSCAASGFTFSSYAMSWVRQAPGKGLEWVSSISASGGSTYYADSVKGRFTISRDNSKNTLYLQMNSLRAEDTAVYYCAKGIFAIYFFYFDYWGQGTLVTVSSGKPGSGKPGSGKPGSGKPGSDIQMTQSPSSLSASVGDRVTITCRASQSISSYLNWYQQKPGKAPKLLIYAASSLQSGVPSRFSGSGSGTDFTLTISSLQPEDFATYYCQQSYSTPYTFGQGTKLEIK

SEQ ID NO: 2036 - protein, 217 aa, synthetic construct; identical to SEQ ID NO: 6
  source 1..217: note = XENP42665 Chain 3 - 38E2[B7H3]_H2_L1.1_Fab-38E2[B7H3]_H2_L1.1_Fab-IgG1_pI(-)_Is osteric_A_L368D/K370S-IgG1_S364K/E357Q/K447del_(G4S)3_1D7B4 [NKG2D]_H1.23_L1_scFv(GKPGS)4

SEQ ID NO: 2037 - protein, 447 aa, synthetic construct; identical to SEQ ID NO: 988
  source 1..447: note = XENP42666 Chain 1 - 38E2[B7H3]_H2_L1.1_Fab-38E2[B7H3]_H2_L1.1_Fab-IgG1_pI(-)_Is osteric_A_L368D/K370S-IgG1_S364K/E357Q/K447del_(G4S)3_1D7B4 [NKG2D]_H1.28_L1_scFv(GKPGS)4

SEQ ID NO: 2038 - protein, 709 aa, synthetic construct
  source 1..709: note = XENP42666 Chain 2 - 38E2[B7H3]_H2_L1.1_Fab-38E2[B7H3]_H2_L1.1_Fab-IgG1_pI(-)_Is osteric_A_L368D/K370S-IgG1_S364K/E357Q/K447del_(G4S)3_1D7B4 [NKG2D]_H1.28_L1_scFv(GKPGS)4
EVQLLESGGGLVQPGGSLRLSCAVSGFSLSSYGVIWVRQAPGKGLEYVSWVSSGGSTNYASSVKGRFTISRDTSKNTVYLQMNSLRAEDTAVYFCARGATNSGTDIWGPGTLVTVSSASTKGPSVFPLAPSSKSTSGGTAALGCLVKDYFPEPVTVSWNSGALTSGVHTFPAVLQSSGLYSLSSVVTVPSSSLGTQTYICNVNHKPSNTKVDKKVEPKSCDKTHTCPPCPAPELLGGPSVFLFPPKPKDTLMISRTPEVTCVVVDVSHEDPEVKFNWYVDGVEVHNAKTKPREEQYNSTYRVVSVLTVLHQDWLNGKEYKCKVSNKALPAPIEKTISKAKGQPREPQVYTLPPSREQMTKNQVKLTCLVKGFYPSDIAVEWESNGQPENNYKTTPPVLDSDGSFFLYSKLTVDKSRWQQGNVFSCSVMHEALHNHYTQKSLSLSPGGGGGSGGGGSGGGGSEVQLLESGGGLVQPGGSLRLSCAASGFTFSSYAMSWVRQAPGKGLEWVSSISASGGSTYYADSVKGRFTISRDNSKNTLYLQMNSLRAEDTAVYYCAKGIFSHYFFYFDYWGQGTLVTVSSGKPGSGKPGSGKPGSGKPGSDIQMTQSPSSLSASVGDRVTITCRASQSISSYLNWYQQKPGKAPKLLIYAASSLQSGVPSRFSGSGSGTDFTLTISSLQPEDFATYYCQQSYSTPYTFGQGTKLEIK

SEQ ID NO: 2039 - protein, 217 aa, synthetic construct; identical to SEQ ID NO: 6
  source 1..217: note = XENP42666 Chain 3 - 38E2[B7H3]_H2_L1.1_Fab-38E2[B7H3]_H2_L1.1_Fab-IgG1_pI(-)_Is osteric_A_L368D/K370S-IgG1_S364K/E357Q/K447del_(G4S)3_1D7B4 [NKG2D]_H1.28_L1_scFv(GKPGS)4

SEQ ID NO: 2040 - protein, 447 aa, synthetic construct; identical to SEQ ID NO: 988
  source 1..447: note = XENP42667 Chain 1 - 38E2[B7H3]_H2_L1.1_Fab-38E2[B7H3]_H2_L1.1_Fab-IgG1_pI(-)_Is osteric_A_L368D/K370S-IgG1_S364K/E357Q/K447del_(G4S)3_1D7B4 [NKG2D]_H1.31_L1_scFv(GKPGS)4

SEQ ID NO: 2041 - protein, 709 aa, synthetic construct
  source 1..709: note = XENP42667 Chain 2 - 38E2[B7H3]_H2_L1.1_Fab-38E2[B7H3]_H2_L1.1_Fab-IgG1_pI(-)_Is osteric_A_L368D/K370S-IgG1_S364K/E357Q/K447del_(G4S)3_1D7B4 [NKG2D]_H1.31_L1_scFv(GKPGS)4
EVQLLESGGGLVQPGGSLRLSCAVSGFSLSSYGVIWVRQAPGKGLEYVSWVSSGGSTNYASSVKGRFTISRDTSKNTVYLQMNSLRAEDTAVYFCARGATNSGTDIWGPGTLVTVSSASTKGPSVFPLAPSSKSTSGGTAALGCLVKDYFPEPVTVSWNSGALTSGVHTFPAVLQSSGLYSLSSVVTVPSSSLGTQTYICNVNHKPSNTKVDKKVEPKSCDKTHTCPPCPAPELLGGPSVFLFPPKPKDTLMISRTPEVTCVVVDVSHEDPEVKFNWYVDGVEVHNAKTKPREEQYNSTYRVVSVLTVLHQDWLNGKEYKCKVSNKALPAPIEKTISKAKGQPREPQVYTLPPSREQMTKNQVKLTCLVKGFYPSDIAVEWESNGQPENNYKTTPPVLDSDGSFFLYSKLTVDKSRWQQGNVFSCSVMHEALHNHYTQKSLSLSPGGGGGSGGGGSGGGGSEVQLLESGGGLVQPGGSLRLSCAASGFTFSSYAMSWVRQAPGKGLEWVSSISASGGSTYYADSVKGRFTISRDNSKNTLYLQMNSLRAEDTAVYYCAKGIFSIAFFYFDYWGQGTLVTVSSGKPGSGKPGSGKPGSGKPGSDIQMTQSPSSLSASVGDRVTITCRASQSISSYLNWYQQKPGKAPKLLIYAASSLQSGVPSRFSGSGSGTDFTLTISSLQPEDFATYYCQQSYSTPYTFGQGTKLEIK

SEQ ID NO: 2042 - protein, 217 aa, synthetic construct; identical to SEQ ID NO: 6
  source 1..217: note = XENP42667 Chain 3 - 38E2[B7H3]_H2_L1.1_Fab-38E2[B7H3]_H2_L1.1_Fab-IgG1_pI(-)_Is osteric_A_L368D/K370S-IgG1_S364K/E357Q/K447del_(G4S)3_1D7B4 [NKG2D]_H1.31_L1_scFv(GKPGS)4

SEQ ID NO: 2043 - protein, 447 aa, synthetic construct; identical to SEQ ID NO: 988
  source 1..447: note = XENP42668 Chain 1 - 38E2[B7H3]_H2_L1.1_Fab-38E2[B7H3]_H2_L1.1_Fab-IgG1_pI(-)_Is osteric_A_L368D/K370S-IgG1_S364K/E357Q/K447del_(G4S)3_1D7B4 [NKG2D]_H1.33_L1_scFv(GKPGS)4

SEQ ID NO: 2044 - protein, 709 aa, synthetic construct
  source 1..709: note = XENP42668 Chain 2 - 38E2[B7H3]_H2_L1.1_Fab-38E2[B7H3]_H2_L1.1_Fab-IgG1_pI(-)_Is osteric_A_L368D/K370S-IgG1_S364K/E357Q/K447del_(G4S)3_1D7B4 [NKG2D]_H1.33_L1_scFv(GKPGS)4
EVQLLESGGGLVQPGGSLRLSCAVSGFSLSSYGVIWVRQAPGKGLEYVSWVSSGGSTNYASSVKGRFTISRDTSKNTVYLQMNSLRAEDTAVYFCARGATNSGTDIWGPGTLVTVSSASTKGPSVFPLAPSSKSTSGGTAALGCLVKDYFPEPVTVSWNSGALTSGVHTFPAVLQSSGLYSLSSVVTVPSSSLGTQTYICNVNHKPSNTKVDKKVEPKSCDKTHTCPPCPAPELLGGPSVFLFPPKPKDTLMISRTPEVTCVVVDVSHEDPEVKFNWYVDGVEVHNAKTKPREEQYNSTYRVVSVLTVLHQDWLNGKEYKCKVSNKALPAPIEKTISKAKGQPREPQVYTLPPSREQMTKNQVKLTCLVKGFYPSDIAVEWESNGQPENNYKTTPPVLDSDGSFFLYSKLTVDKSRWQQGNVFSCSVMHEALHNHYTQKSLSLSPGGGGGSGGGGSGGGGSEVQLLESGGGLVQPGGSLRLSCAASGFTFSSYAMSWVRQAPGKGLEWVSSISASGGSTYYADSVKGRFTISRDNSKNTLYLQMNSLRAEDTAVYYCAKGIFSIEFFYFDYWGQGTLVTVSSGKPGSGKPGSGKPGSGKPGSDIQMTQSPSSLSASVGDRVTITCRASQSISSYLNWYQQKPGKAPKLLIYAASSLQSGVPSRFSGSGSGTDFTLTISSLQPEDFATYYCQQSYSTPYTFGQGTKLEIK

SEQ ID NO: 2045 - protein, 217 aa, synthetic construct; identical to SEQ ID NO: 6
  source 1..217: note = XENP42668 Chain 3 - 38E2[B7H3]_H2_L1.1_Fab-38E2[B7H3]_H2_L1.1_Fab-IgG1_pI(-)_Is osteric_A_L368D/K370S-IgG1_S364K/E357Q/K447del_(G4S)3_1D7B4 [NKG2D]_H1.33_L1_scFv(GKPGS)4

SEQ ID NO: 2046 - protein, 447 aa, synthetic construct; identical to SEQ ID NO: 988
  source 1..447: note = XENP42669 Chain 1 - 38E2[B7H3]_H2_L1.1_Fab-38E2[B7H3]_H2_L1.1_Fab-IgG1_pI(-)_Is osteric_A_L368D/K370S-IgG1_S364K/E357Q/K447del_(G4S)3_1D7B4 [NKG2D]_H1.42_L1_scFv(GKPGS)4

SEQ ID NO: 2047 - protein, 709 aa, synthetic construct
  source 1..709: note = XENP42669 Chain 2 - 38E2[B7H3]_H2_L1.1_Fab-38E2[B7H3]_H2_L1.1_Fab-IgG1_pI(-)_Is osteric_A_L368D/K370S-IgG1_S364K/E357Q/K447del_(G4S)3_1D7B4 [NKG2D]_H1.42_L1_scFv(GKPGS)4
EVQLLESGGGLVQPGGSLRLSCAVSGFSLSSYGVIWVRQAPGKGLEYVSWVSSGGSTNYASSVKGRFTISRDTSKNTVYLQMNSLRAEDTAVYFCARGATNSGTDIWGPGTLVTVSSASTKGPSVFPLAPSSKSTSGGTAALGCLVKDYFPEPVTVSWNSGALTSGVHTFPAVLQSSGLYSLSSVVTVPSSSLGTQTYICNVNHKPSNTKVDKKVEPKSCDKTHTCPPCPAPELLGGPSVFLFPPKPKDTLMISRTPEVTCVVVDVSHEDPEVKFNWYVDGVEVHNAKTKPREEQYNSTYRVVSVLTVLHQDWLNGKEYKCKVSNKALPAPIEKTISKAKGQPREPQVYTLPPSREQMTKNQVKLTCLVKGFYPSDIAVEWESNGQPENNYKTTPPVLDSDGSFFLYSKLTVDKSRWQQGNVFSCSVMHEALHNHYTQKSLSLSPGGGGGSGGGGSGGGGSEVQLLESGGGLVQPGGSLRLSCAASGFTFSSYAMSWVRQAPGKGLEWVSSISASGGSTYYADSVKGRFTISRDNSKNTLYLQMNSLRAEDTAVYYCAKGIFSIYFHYFDYWGQGTLVTVSSGKPGSGKPGSGKPGSGKPGSDIQMTQSPSSLSASVGDRVTITCRASQSISSYLNWYQQKPGKAPKLLIYAASSLQSGVPSRFSGSGSGTDFTLTISSLQPEDFATYYCQQSYSTPYTFGQGTKLEIK

SEQ ID NO: 2048 - protein, 217 aa, synthetic construct; identical to SEQ ID NO: 6
  source 1..217: note = XENP42669 Chain 3 - 38E2[B7H3]_H2_L1.1_Fab-38E2[B7H3]_H2_L1.1_Fab-IgG1_pI(-)_Is osteric_A_L368D/K370S-IgG1_S364K/E357Q/K447del_(G4S)3_1D7B4 [NKG2D]_H1.42_L1_scFv(GKPGS)4

SEQ ID NO: 2049 - protein, 447 aa, synthetic construct; identical to SEQ ID NO: 4
  source 1..447: note = XENP42670 Chain 1 - 38E2[B7H3]_H2_L1.1_Fab-38E2[B7H3]_H2_L1.1_Fab-IgG1_pI(-)_Is osteric_A_S239D/I332E/L368D/K370S-IgG1_S239D/I332E/S364K/E3 57Q/K447del_(G4S)3_1D7B4[NKG2D]_H1.3_L1_scFv(GKPGS)4

SEQ ID NO: 2050 - protein, 709 aa, synthetic construct
  source 1..709: note = XENP42670 Chain 2 - 38E2[B7H3]_H2_L1.1_Fab-38E2[B7H3]_H2_L1.1_Fab-IgG1_pI(-)_Is osteric_A_S239D/I332E/L368D/K370S-IgG1_S239D/I332E/S364K/E3 57Q/K447del_(G4S)3_1D7B4[NKG2D]_H1.3_L1_scFv(GKPGS)4
EVQLLESGGGLVQPGGSLRLSCAVSGFSLSSYGVIWVRQAPGKGLEYVSWVSSGGSTNYASSVKGRFTISRDTSKNTVYLQMNSLRAEDTAVYFCARGATNSGTDIWGPGTLVTVSSASTKGPSVFPLAPSSKSTSGGTAALGCLVKDYFPEPVTVSWNSGALTSGVHTFPAVLQSSGLYSLSSVVTVPSSSLGTQTYICNVNHKPSNTKVDKKVEPKSCDKTHTCPPCPAPELLGGPDVFLFPPKPKDTLMISRTPEVTCVVVDVSHEDPEVKFNWYVDGVEVHNAKTKPREEQYNSTYRVVSVLTVLHQDWLNGKEYKCKVSNKALPAPEEKTISKAKGQPREPQVYTLPPSREQMTKNQVKLTCLVKGFYPSDIAVEWESNGQPENNYKTTPPVLDSDGSFFLYSKLTVDKSRWQQGNVFSCSVMHEALHNHYTQKSLSLSPGGGGGSGGGGSGGGGSEVQLLESGGGLVQPGGSLRLSCAASGFTFSSSAMSWVRQAPGKGLEWVSSISASGGSTYYADSVKGRFTISRDNSKNTLYLQMNSLRAEDTAVYYCAKGIFSIYFFYFDYWGQGTLVTVSSGKPGSGKPGSGKPGSGKPGSDIQMTQSPSSLSASVGDRVTITCRASQSISSYLNWYQQKPGKAPKLLIYAASSLQSGVPSRFSGSGSGTDFTLTISSLQPEDFATYYCQQSYSTPYTFGQGTKLEIK

SEQ ID NO: 2051 - protein, 217 aa, synthetic construct; identical to SEQ ID NO: 6
  source 1..217: note = XENP42670 Chain 3 - 38E2[B7H3]_H2_L1.1_Fab-38E2[B7H3]_H2_L1.1_Fab-IgG1_pI(-)_Is osteric_A_S239D/I332E/L368D/K370S-IgG1_S239D/I332E/S364K/E3 57Q/K447del_(G4S)3_1D7B4[NKG2D]_H1.3_L1_scFv(GKPGS)4

SEQ ID NO: 2052 - protein, 447 aa, synthetic construct; identical to SEQ ID NO: 4
  source 1..447: note = XENP42671 Chain 1 - 38E2[B7H3]_H2_L1.1_Fab-38E2[B7H3]_H2_L1.1_Fab-IgG1_pI(-)_Is osteric_A_S239D/I332E/L368D/K370S-IgG1_S239D/I332E/S364K/E3 57Q/K447del_(G4S)3_1D7B4[NKG2D]_H1.23_L1_scFv(GKPGS)4

SEQ ID NO: 2053 - protein, 709 aa, synthetic construct
  source 1..709: note = XENP42671 Chain 2 - 38E2[B7H3]_H2_L1.1_Fab-38E2[B7H3]_H2_L1.1_Fab-IgG1_pI(-)_Is osteric_A_S239D/I332E/L368D/K370S-IgG1_S239D/I332E/S364K/E3 57Q/K447del_(G4S)3_1D7B4[NKG2D]_H1.23_L1_scFv(GKPGS)4
EVQLLESGGGLVQPGGSLRLSCAVSGFSLSSYGVIWVRQAPGKGLEYVSWVSSGGSTNYASSVKGRFTISRDTSKNTVYLQMNSLRAEDTAVYFCARGATNSGTDIWGPGTLVTVSSASTKGPSVFPLAPSSKSTSGGTAALGCLVKDYFPEPVTVSWNSGALTSGVHTFPAVLQSSGLYSLSSVVTVPSSSLGTQTYICNVNHKPSNTKVDKKVEPKSCDKTHTCPPCPAPELLGGPDVFLFPPKPKDTLMISRTPEVTCVVVDVSHEDPEVKFNWYVDGVEVHNAKTKPREEQYNSTYRVVSVLTVLHQDWLNGKEYKCKVSNKALPAPEEKTISKAKGQPREPQVYTLPPSREQMTKNQVKLTCLVKGFYPSDIAVEWESNGQPENNYKTTPPVLDSDGSFFLYSKLTVDKSRWQQGNVFSCSVMHEALHNHYTQKSLSLSPGGGGGSGGGGSGGGGSEVQLLESGGGLVQPGGSLRLSCAASGFTFSSYAMSWVRQAPGKGLEWVSSISASGGSTYYADSVKGRFTISRDNSKNTLYLQMNSLRAEDTAVYYCAKGIFAIYFFYFDYWGQGTLVTVSSGKPGSGKPGSGKPGSGKPGSDIQMTQSPSSLSASVGDRVTITCRASQSISSYLNWYQQKPGKAPKLLIYAASSLQSGVPSRFSGSGSGTDFTLTISSLQPEDFATYYCQQSYSTPYTFGQGTKLEIK

SEQ ID NO: 2054 - protein, 217 aa, synthetic construct; identical to SEQ ID NO: 6
  source 1..217: note = XENP42671 Chain 3 - 38E2[B7H3]_H2_L1.1_Fab-38E2[B7H3]_H2_L1.1_Fab-IgG1_pI(-)_Is osteric_A_S239D/I332E/L368D/K370S-IgG1_S239D/I332E/S364K/E3 57Q/K447del_(G4S)3_1D7B4[NKG2D]_H1.23_L1_scFv(GKPGS)4

SEQ ID NO: 2055 - protein, 447 aa, synthetic construct; identical to SEQ ID NO: 4
  source 1..447: note = XENP42672 Chain 1 - 38E2[B7H3]_H2_L1.1_Fab-38E2[B7H3]_H2_L1.1_Fab-IgG1_pI(-)_Is osteric_A_S239D/I332E/L368D/K370S-IgG1_S239D/I332E/S364K/E3 57Q/K447del_(G4S)3_1D7B4[NKG2D]_H1.28_L1_scFv(GKPGS)4

SEQ ID NO: 2056 - protein, 709 aa, synthetic construct
  source 1..709: note = XENP42672 Chain 2 - 38E2[B7H3]_H2_L1.1_Fab-38E2[B7H3]_H2_L1.1_Fab-IgG1_pI(-)_Is osteric_A_S239D/I332E/L368D/K370S-IgG1_S239D/I332E/S364K/E3 57Q/K447del_(G4S)3_1D7B4[NKG2D]_H1.28_L1_scFv(GKPGS)4
EVQLLESGGGLVQPGGSLRLSCAVSGFSLSSYGVIWVRQAPGKGLEYVSWVSSGGSTNYASSVKGRFTISRDTSKNTVYLQMNSLRAEDTAVYFCARGATNSGTDIWGPGTLVTVSSASTKGPSVFPLAPSSKSTSGGTAALGCLVKDYFPEPVTVSWNSGALTSGVHTFPAVLQSSGLYSLSSVVTVPSSSLGTQTYICNVNHKPSNTKVDKKVEPKSCDKTHTCPPCPAPELLGGPDVFLFPPKPKDTLMISRTPEVTCVVVDVSHEDPEVKFNWYVDGVEVHNAKTKPREEQYNSTYRVVSVLTVLHQDWLNGKEYKCKVSNKALPAPEEKTISKAKGQPREPQVYTLPPSREQMTKNQVKLTCLVKGFYPSDIAVEWESNGQPENNYKTTPPVLDSDGSFFLYSKLTVDKSRWQQGNVFSCSVMHEALHNHYTQKSLSLSPGGGGGSGGGGSGGGGSEVQLLESGGGLVQPGGSLRLSCAASGFTFSSYAMSWVRQAPGKGLEWVSSISASGGSTYYADSVKGRFTISRDNSKNTLYLQMNSLRAEDTAVYYCAKGIFSHYFFYFDYWGQGTLVTVSSGKPGSGKPGSGKPGSGKPGSDIQMTQSPSSLSASVGDRVTITCRASQSISSYLNWYQQKPGKAPKLLIYAASSLQSGVPSRFSGSGSGTDFTLTISSLQPEDFATYYCQQSYSTPYTFGQGTKLEIK

SEQ ID NO: 2057 - protein, 217 aa, synthetic construct; identical to SEQ ID NO: 6
  source 1..217: note = XENP42672 Chain 3 - 38E2[B7H3]_H2_L1.1_Fab-38E2[B7H3]_H2_L1.1_Fab-IgG1_pI(-)_Is osteric_A_S239D/I332E/L368D/K370S-IgG1_S239D/I332E/S364K/E3 57Q/K447del_(G4S)3_1D7B4[NKG2D]_H1.28_L1_scFv(GKPGS)4

SEQ ID NO: 2058 - protein, 447 aa, synthetic construct; identical to SEQ ID NO: 4
  source 1..447: note = XENP42673 Chain 1 - 38E2[B7H3]_H2_L1.1_Fab-38E2[B7H3]_H2_L1.1_Fab-IgG1_pI(-)_Is osteric_A_S239D/I332E/L368D/K370S-IgG1_S239D/I332E/S364K/E3 57Q/K447del_(G4S)3_1D7B4[NKG2D]_H1.31_L1_scFv(GKPGS)4

SEQ ID NO: 2059 - protein, 709 aa, synthetic construct
  source 1..709: note = XENP42673 Chain 2 - 38E2[B7H3]_H2_L1.1_Fab-38E2[B7H3]_H2_L1.1_Fab-IgG1_pI(-)_Is osteric_A_S239D/I332E/L368D/K370S-IgG1_S239D/I332E/S364K/E3 57Q/K447del_(G4S)3_1D7B4[NKG2D]_H1.31_L1_scFv(GKPGS)4
EVQLLESGGGLVQPGGSLRLSCAVSGFSLSSYGVIWVRQAPGKGLEYVSWVSSGGSTNYASSVKGRFTISRDTSKNTVYLQMNSLRAEDTAVYFCARGATNSGTDIWGPGTLVTVSSASTKGPSVFPLAPSSKSTSGGTAALGCLVKDYFPEPVTVSWNSGALTSGVHTFPAVLQSSGLYSLSSVVTVPSSSLGTQTYICNVNHKPSNTKVDKKVEPKSCDKTHTCPPCPAPELLGGPDVFLFPPKPKDTLMISRTPEVTCVVVDVSHEDPEVKFNWYVDGVEVHNAKTKPREEQYNSTYRVVSVLTVLHQDWLNGKEYKCKVSNKALPAPEEKTISKAKGQPREPQVYTLPPSREQMTKNQVKLTCLVKGFYPSDIAVEWESNGQPENNYKTTPPVLDSDGSFFLYSKLTVDKSRWQQGNVFSCSVMHEALHNHYTQKSLSLSPGGGGGSGGGGSGGGGSEVQLLESGGGLVQPGGSLRLSCAASGFTFSSYAMSWVRQAPGKGLEWVSSISASGGSTYYADSVKGRFTISRDNSKNTLYLQMNSLRAEDTAVYYCAKGIFSIAFFYFDYWGQGTLVTVSSGKPGSGKPGSGKPGSGKPGSDIQMTQSPSSLSASVGDRVTITCRASQSISSYLNWYQQKPGKAPKLLIYAASSLQSGVPSRFSGSGSGTDFTLTISSLQPEDFATYYCQQSYSTPYTFGQGTKLEIK

SEQ ID NO: 2060 - protein, 217 aa, synthetic construct; identical to SEQ ID NO: 6
  source 1..217: note = XENP42673 Chain 3 - 38E2[B7H3]_H2_L1.1_Fab-38E2[B7H3]_H2_L1.1_Fab-IgG1_pI(-)_Is osteric_A_S239D/I332E/L368D/K370S-IgG1_S239D/I332E/S364K/E3 57Q/K447del_(G4S)3_1D7B4[NKG2D]_H1.31_L1_scFv(GKPGS)4

SEQ ID NO: 2061 - protein, 447 aa, synthetic construct; identical to SEQ ID NO: 4
  source 1..447: note = XENP42674 Chain 1 - 38E2[B7H3]_H2_L1.1_Fab-38E2[B7H3]_H2_L1.1_Fab-IgG1_pI(-)_Is osteric_A_S239D/I332E/L368D/K370S-IgG1_S239D/I332E/S364K/E3 57Q/K447del_(G4S)3_1D7B4[NKG2D]_H1.33_L1_scFv(GKPGS)4

SEQ ID NO: 2062 - protein, 709 aa, synthetic construct
  source 1..709: note = XENP42674 Chain 2 - 38E2[B7H3]_H2_L1.1_Fab-38E2[B7H3]_H2_L1.1_Fab-IgG1_pI(-)_Is osteric_A_S239D/I332E/L368D/K370S-IgG1_S239D/I332E/S364K/E3 57Q/K447del_(G4S)3_1D7B4[NKG2D]_H1.33_L1_scFv(GKPGS)4
EVQLLESGGGLVQPGGSLRLSCAVSGFSLSSYGVIWVRQAPGKGLEYVSWVSSGGSTNYASSVKGRFTISRDTSKNTVYLQMNSLRAEDTAVYFCARGATNSGTDIWGPGTLVTVSSASTKGPSVFPLAPSSKSTSGGTAALGCLVKDYFPEPVTVSWNSGALTSGVHTFPAVLQSSGLYSLSSVVTVPSSSLGTQTYICNVNHKPSNTKVDKKVEPKSCDKTHTCPPCPAPELLGGPDVFLFPPKPKDTLMISRTPEVTCVVVDVSHEDPEVKFNWYVDGVEVHNAKTKPREEQYNSTYRVVSVLTVLHQDWLNGKEYKCKVSNKALPAPEEKTISKAKGQPREPQVYTLPPSREQMTKNQVKLTCLVKGFYPSDIAVEWESNGQPENNYKTTPPVLDSDGSFFLYSKLTVDKSRWQQGNVFSCSVMHEALHNHYTQKSLSLSPGGGGGSGGGGSGGGGSEVQLLESGGGLVQPGGSLRLSCAASGFTFSSYAMSWVRQAPGKGLEWVSSISASGGSTYYADSVKGRFTISRDNSKNTLYLQMNSLRAEDTAVYYCAKGIFSIEFFYFDYWGQGTLVTVSSGKPGSGKPGSGKPGSGKPGSDIQMTQSPSSLSASVGDRVTITCRASQSISSYLNWYQQKPGKAPKLLIYAASSLQSGVPSRFSGSGSGTDFTLTISSLQPEDFATYYCQQSYSTPYTFGQGTKLEIK

SEQ ID NO: 2063 - protein, 217 aa, synthetic construct; identical to SEQ ID NO: 6
  source 1..217: note = XENP42674 Chain 3 - 38E2[B7H3]_H2_L1.1_Fab-38E2[B7H3]_H2_L1.1_Fab-IgG1_pI(-)_Is osteric_A_S239D/I332E/L368D/K370S-IgG1_S239D/I332E/S364K/E3 57Q/K447del_(G4S)3_1D7B4[NKG2D]_H1.33_L1_scFv(GKPGS)4

SEQ ID NO: 2064 - protein, 447 aa, synthetic construct; identical to SEQ ID NO: 4
  source 1..447: note = XENP42675 Chain 1 - 38E2[B7H3]_H2_L1.1_Fab-38E2[B7H3]_H2_L1.1_Fab-IgG1_pI(-)_Is osteric_A_S239D/I332E/L368D/K370S-IgG1_S239D/I332E/S364K/E3 57Q/K447del_(G4S)3_1D7B4[NKG2D]_H1.42_L1_scFv(GKPGS)4

SEQ ID NO: 2065 - protein, 709 aa, synthetic construct
  source 1..709: note = XENP42675 Chain 2 - 38E2[B7H3]_H2_L1.1_Fab-38E2[B7H3]_H2_L1.1_Fab-IgG1_pI(-)_Is osteric_A_S239D/I332E/L368D/K370S-IgG1_S239D/I332E/S364K/E3 57Q/K447del_(G4S)3_1D7B4[NKG2D]_H1.42_L1_scFv(GKPGS)4
EVQLLESGGGLVQPGGSLRLSCAVSGFSLSSYGVIWVRQAPGKGLEYVSWVSSGGSTNYASSVKGRFTISRDTSKNTVYLQMNSLRAEDTAVYFCARGATNSGTDIWGPGTLVTVSSASTKGPSVFPLAPSSKSTSGGTAALGCLVKDYFPEPVTVSWNSGALTSGVHTFPAVLQSSGLYSLSSVVTVPSSSLGTQTYICNVNHKPSNTKVDKKVEPKSCDKTHTCPPCPAPELLGGPDVFLFPPKPKDTLMISRTPEVTCVVVDVSHEDPEVKFNWYVDGVEVHNAKTKPREEQYNSTYRVVSVLTVLHQDWLNGKEYKCKVSNKALPAPEEKTISKAKGQPREPQVYTLPPSREQMTKNQVKLTCLVKGFYPSDIAVEWESNGQPENNYKTTPPVLDSDGSFFLYSKLTVDKSRWQQGNVFSCSVMHEALHNHYTQKSLSLSPGGGGGSGGGGSGGGGSEVQLLESGGGLVQPGGSLRLSCAASGFTFSSYAMSWVRQAPGKGLEWVSSISASGGSTYYADSVKGRFTISRDNSKNTLYLQMNSLRAEDTAVYYCAKGIFSIYFHYFDYWGQGTLVTVSSGKPGSGKPGSGKPGSGKPGSDIQMTQSPSSLSASVGDRVTITCRASQSISSYLNWYQQKPGKAPKLLIYAASSLQSGVPSRFSGSGSGTDFTLTISSLQPEDFATYYCQQSYSTPYTFGQGTKLEIK

SEQ ID NO: 2066 - protein, 217 aa, synthetic construct; identical to SEQ ID NO: 6
  source 1..217: note = XENP42675 Chain 3 - 38E2[B7H3]_H2_L1.1_Fab-38E2[B7H3]_H2_L1.1_Fab-IgG1_pI(-)_Is osteric_A_S239D/I332E/L368D/K370S-IgG1_S239D/I332E/S364K/E3 57Q/K447del_(G4S)3_1D7B4[NKG2D]_H1.42_L1_scFv(GKPGS)4

SEQ ID NO: 2067 - protein, 447 aa, synthetic construct; identical to SEQ ID NO: 992
  source 1..447: note = XENP42713 Chain 1 - 38E2[B7H3]_H2_L1.1_Fab-1D7B4[NKG2D]_H1L1_scFv(GKPGS)4-IgG1_ pI(-)_Isosteric_A_S239D/L368D/K370S-Fc(216)_IgG1_C220S/S239 D/S364K/E357Q

SEQ ID NO: 2068 - protein, 480 aa, synthetic construct; identical to SEQ ID NO: 2002
  source 1..480: note = XENP42713 Chain 2 - 38E2[B7H3]_H2_L1.1_Fab-1D7B4[NKG2D]_H1L1_scFv(GKPGS)4-IgG1_ pI(-)_Isosteric_A_S239D/L368D/K370S-Fc(216)_IgG1_C220S/S239 D/S364K/E357Q

SEQ ID NO: 2069 - protein, 217 aa, synthetic construct; identical to SEQ ID NO: 6
  source 1..217: note = XENP42713 Chain 3 - 38E2[B7H3]_H2_L1.1_Fab-1D7B4[NKG2D]_H1L1_scFv(GKPGS)4-IgG1_ pI(-)_Isosteric_A_S239D/L368D/K370S-Fc(216)_IgG1_C220S/S239 D/S364K/E357Q

SEQ ID NO: 2070 - protein, 447 aa, synthetic construct; identical to SEQ ID NO: 994
  source 1..447: note = XENP42714 Chain 1 - 38E2[B7H3]_H2_L1.1_Fab-1D7B4[NKG2D]_H1L1_scFv(GKPGS)4-IgG1_ pI(-)_Isosteric_A_I332E/L368D/K370S-Fc(216)_IgG1_C220S/S239 D/S364K/E357Q

SEQ ID NO: 2071 - protein, 480 aa, synthetic construct; identical to SEQ ID NO: 2002
  source 1..480: note = XENP42714 Chain 2 - 38E2[B7H3]_H2_L1.1_Fab-1D7B4[NKG2D]_H1L1_scFv(GKPGS)4-IgG1_ pI(-)_Isosteric_A_I332E/L368D/K370S-Fc(216)_IgG1_C220S/S239 D/S364K/E357Q

SEQ ID NO: 2072 - protein, 217 aa, synthetic construct; identical to SEQ ID NO: 6
  source 1..217: note = XENP42714 Chain 3 - 38E2[B7H3]_H2_L1.1_Fab-1D7B4[NKG2D]_H1L1_scFv(GKPGS)4-IgG1_ pI(-)_Isosteric_A_I332E/L368D/K370S-Fc(216)_IgG1_C220S/S239 D/S364K/E357Q

SEQ ID NO: 2073 - protein, 446 aa, synthetic construct; identical to SEQ ID NO: 1038
  source 1..446: note = XENP42715 Chain 1 - 38E2[B7H3]_H2_L1.1_Fab-1D7B4[NKG2D]_L1H1_scFv(GKPGS)4-IgG1_ pI(-)_Isosteric_A_PVA_/S267K/L368D/K370S-Fc(216)_IgG1_C220S /PVA_/S267K/S364K/E357Q

SEQ ID NO: 2074 - protein, 479 aa, synthetic construct; identical to SEQ ID NO: 1799
  source 1..479: note = XENP42715 Chain 2 - 38E2[B7H3]_H2_L1.1_Fab-1D7B4[NKG2D]_L1H1_scFv(GKPGS)4-IgG1_ pI(-)_Isosteric_A_PVA_/S267K/L368D/K370S-Fc(216)_IgG1_C220S /PVA_/S267K/S364K/E357Q

SEQ ID NO: 2075 - protein, 217 aa, synthetic construct; identical to SEQ ID NO: 6
  source 1..217: note = XENP42715 Chain 3 - 38E2[B7H3]_H2_L1.1_Fab-1D7B4[NKG2D]_L1H1_scFv(GKPGS)4-IgG1_ pI(-)_Isosteric_A_PVA_/S267K/L368D/K370S-Fc(216)_IgG1_C220S /PVA_/S267K/S364K/E357Q

SEQ ID NO: 2076 - protein, 447 aa, synthetic construct; identical to SEQ ID NO: 992
  source 1..447: note = XENP42716 Chain 1 - 38E2[B7H3]_H2_L1.1_Fab-1D7B4[NKG2D]_L1H1_scFv(GKPGS)4-IgG1_ pI(-)_Isosteric_A_S239D/L368D/K370S-Fc(216)_IgG1_C220S/S239 D/S364K/E357Q

SEQ ID NO: 2077 - protein, 480 aa, synthetic construct
  source 1..480: note = XENP42716 Chain 2 - 38E2[B7H3]_H2_L1.1_Fab-1D7B4[NKG2D]_L1H1_scFv(GKPGS)4-IgG1_ pI(-)_Isosteric_A_S239D/L368D/K370S-Fc(216)_IgG1_C220S/S239 D/S364K/E357Q
DIQMTQSPSSLSASVGDRVTITCRASQSISSYLNWYQQKPGKAPKLLIYAASSLQSGVPSRFSGSGSGTDFTLTISSLQPEDFATYYCQQSYSTPYTFGQGTKLEIKGKPGSGKPGSGKPGSGKPGSEVQLLESGGGLVQPGGSLRLSCAASGFTFSSYAMSWVRQAPGKGLEWVSSISASGGSTYYADSVKGRFTISRDNSKNTLYLQMNSLRAEDTAVYYCAKGIFSIYFFYFDYWGQGTLVTVSSEPKSSDKTHTCPPCPAPELLGGPDVFLFPPKPKDTLMISRTPEVTCVVVDVSHEDPEVKFNWYVDGVEVHNAKTKPREEQYNSTYRVVSVLTVLHQDWLNGKEYKCKVSNKALPAPIEKTISKAKGQPREPQVYTLPPSREQMTKNQVKLTCLVKGFYPSDIAVEWESNGQPENNYKTTPPVLDSDGSFFLYSKLTVDKSRWQQGNVFSCSVMHEALHNHYTQKSLSLSPGK

SEQ ID NO: 2078 - protein, 217 aa, synthetic construct; identical to SEQ ID NO: 6
  source 1..217: note = XENP42716 Chain 3 - 38E2[B7H3]_H2_L1.1_Fab-1D7B4[NKG2D]_L1H1_scFv(GKPGS)4-IgG1_ pI(-)_Isosteric_A_S239D/L368D/K370S-Fc(216)_IgG1_C220S/S239 D/S364K/E357Q

SEQ ID NO: 2079 - protein, 447 aa, synthetic construct; identical to SEQ ID NO: 994
  source 1..447: note = XENP42717 Chain 1 - 38E2[B7H3]_H2_L1.1_Fab-1D7B4[NKG2D]_L1H1_scFv(GKPGS)4-IgG1_ pI(-)_Isosteric_A_I332E/L368D/K370S-Fc(216)_IgG1_C220S/S239 D/S364K/E357Q

SEQ ID NO: 2080 - protein, 480 aa, synthetic construct; identical to SEQ ID NO: 2077
  source 1..480: note = XENP42717 Chain 2 - 38E2[B7H3]_H2_L1.1_Fab-1D7B4[NKG2D]_L1H1_scFv(GKPGS)4-IgG1_ pI(-)_Isosteric_A_I332E/L368D/K370S-Fc(216)_IgG1_C220S/S239 D/S364K/E357Q

SEQ ID NO: 2081 - protein, 217 aa, synthetic construct; identical to SEQ ID NO: 6
  source 1..217: note = XENP42717 Chain 3 - 38E2[B7H3]_H2_L1.1_Fab-1D7B4[NKG2D]_L1H1_scFv(GKPGS)4-IgG1_ pI(-)_Isosteric_A_I332E/L368D/K370S-Fc(216)_IgG1_C220S/S239 D/S364K/E357Q

SEQ ID NO: 2082 - protein, 447 aa, synthetic construct; identical to SEQ ID NO: 4
  source 1..447: note = XENP42718 Chain 1 - 38E2[B7H3]_H2_L1.1_Fab-1D7B4[NKG2D]_L1H1_scFv(GKPGS)4-IgG1_ pI(-)_Isosteric_A_S239D/I332E/L368D/K370S-Fc(216)_IgG1_C220 S/S239D/I332E/S364K/E357Q

SEQ ID NO: 2083 - protein, 480 aa, synthetic construct
  source 1..480: note = XENP42718 Chain 2 - 38E2[B7H3]_H2_L1.1_Fab-1D7B4[NKG2D]_L1H1_scFv(GKPGS)4-IgG1_ pI(-)_Isosteric_A_S239D/I332E/L368D/K370S-Fc(216)_IgG1_C220 S/S239D/I332E/S364K/E357Q
DIQMTQSPSSLSASVGDRVTITCRASQSISSYLNWYQQKPGKAPKLLIYAASSLQSGVPSRFSGSGSGTDFTLTISSLQPEDFATYYCQQSYSTPYTFGQGTKLEIKGKPGSGKPGSGKPGSGKPGSEVQLLESGGGLVQPGGSLRLSCAASGFTFSSYAMSWVRQAPGKGLEWVSSISASGGSTYYADSVKGRFTISRDNSKNTLYLQMNSLRAEDTAVYYCAKGIFSIYFFYFDYWGQGTLVTVSSEPKSSDKTHTCPPCPAPELLGGPDVFLFPPKPKDTLMISRTPEVTCVVVDVSHEDPEVKFNWYVDGVEVHNAKTKPREEQYNSTYRVVSVLTVLHQDWLNGKEYKCKVSNKALPAPEEKTISKAKGQPREPQVYTLPPSREQMTKNQVKLTCLVKGFYPSDIAVEWESNGQPENNYKTTPPVLDSDGSFFLYSKLTVDKSRWQQGNVFSCSVMHEALHNHYTQKSLSLSPGK

SEQ ID NO: 2084 - protein, 217 aa, synthetic construct; identical to SEQ ID NO: 6
  source 1..217: note = XENP42718 Chain 3 - 38E2[B7H3]_H2_L1.1_Fab-1D7B4[NKG2D]_L1H1_scFv(GKPGS)4-IgG1_ pI(-)_Isosteric_A_S239D/I332E/L368D/K370S-Fc(216)_IgG1_C220 S/S239D/I332E/S364K/E357Q

SEQ ID NO: 2085 - protein, 451 aa, synthetic construct
  source 1..451: note = XENP42719 Chain 1 - 1D7B4[NKG2D]_H1L1_Fab-38E2[B7H3]_H2_L1.1_scFv(GKPGS)4-IgG1_ pI(-)_Isosteric_A_S239D/L368D/K370S-Fc(216)_IgG1_C220S/S239 D/S364K/E357Q/
EVQLLESGGGLVQPGGSLRLSCAASGFTFSSYAMSWVRQAPGKGLEWVSSISASGGSTYYADSVKGRFTISRDNSKNTLYLQMNSLRAEDTAVYYCAKGIFSIYFFYFDYWGQGTLVTVSSASTKGPSVFPLAPSSKSTSGGTAALGCLVKDYFPEPVTVSWNSGALTSGVHTFPAVLQSSGLYSLSSVVTVPSSSLGTQTYICNVNHKPSDTKVDKKVEPKSCDKTHTCPPCPAPELLGGPDVFLFPPKPKDTLMISRTPEVTCVVVDVSHEDPEVKFNWYVDGVEVHNAKTKPREEEYNSTYRVVSVLTVLHQDWLNGKEYKCKVSNKALPAPIEKTISKAKGQPREPQVYTLPPSREEMTKNQVSLTCDVSGFYPSDIAVEWESDGQPENNYKTTPPVLDSDGSFFLYSKLTVDKSRWEQGDVFSCSVMHEALHNHYTQKSLSLSPGK

SEQ ID NO: 2086 - protein, 479 aa, synthetic construct; identical to SEQ ID NO: 993
  source 1..479: note = XENP42719 Chain 2 - 1D7B4[NKG2D]_H1L1_Fab-38E2[B7H3]_H2_L1.1_scFv(GKPGS)4-IgG1_ pI(-)_Isosteric_A_S239D/L368D/K370S-Fc(216)_IgG1_C220S/S239 D/S364K/E357Q/

SEQ ID NO: 2087 - protein, 214 aa, synthetic construct; identical to SEQ ID NO: 3
  source 1..214: note = XENP42719 Chain 3 - 1D7B4[NKG2D]_H1L1_Fab-38E2[B7H3]_H2_L1.1_scFv(GKPGS)4-IgG1_ pI(-)_Isosteric_A_S239D/L368D/K370S-Fc(216)_IgG1_C220S/S239 D/S364K/E357Q/

SEQ ID NO: 2088 - protein, 451 aa, synthetic construct
  source 1..451: note = XENP42720 Chain 1 - 1D7B4[NKG2D]_H1L1_Fab-38E2[B7H3]_H2_L1.1_scFv(GKPGS)4-IgG1_ pI(-)_Isosteric_A_I332E/L368D/K370S-Fc(216)_IgG1_C220S/S239 D/S364K/E357Q
EVQLLESGGGLVQPGGSLRLSCAASGFTFSSYAMSWVRQAPGKGLEWVSSISASGGSTYYADSVKGRFTISRDNSKNTLYLQMNSLRAEDTAVYYCAKGIFSIYFFYFDYWGQGTLVTVSSASTKGPSVFPLAPSSKSTSGGTAALGCLVKDYFPEPVTVSWNSGALTSGVHTFPAVLQSSGLYSLSSVVTVPSSSLGTQTYICNVNHKPSDTKVDKKVEPKSCDKTHTCPPCPAPELLGGPSVFLFPPKPKDTLMISRTPEVTCVVVDVSHEDPEVKFNWYVDGVEVHNAKTKPREEEYNSTYRVVSVLTVLHQDWLNGKEYKCKVSNKALPAPEEKTISKAKGQPREPQVYTLPPSREEMTKNQVSLTCDVSGFYPSDIAVEWESDGQPENNYKTTPPVLDSDGSFFLYSKLTVDKSRWEQGDVFSCSVMHEALHNHYTQKSLSLSPGK

SEQ ID NO: 2089 - protein, 479 aa, synthetic construct; identical to SEQ ID NO: 993
  source 1..479: note = XENP42720 Chain 2 - 1D7B4[NKG2D]_H1L1_Fab-38E2[B7H3]_H2_L1.1_scFv(GKPGS)4-IgG1_ pI(-)_Isosteric_A_I332E/L368D/K370S-Fc(216)_IgG1_C220S/S239 D/S364K/E357Q

SEQ ID NO: 2090 - protein, 214 aa, synthetic construct; identical to SEQ ID NO: 3
  source 1..214: note = XENP42720 Chain 3 - 1D7B4[NKG2D]_H1L1_Fab-38E2[B7H3]_H2_L1.1_scFv(GKPGS)4-IgG1_ pI(-)_Isosteric_A_I332E/L368D/K370S-Fc(216)_IgG1_C220S/S239 D/S364K/E357Q

SEQ ID NO: 2091 - protein, 451 aa, synthetic construct; identical to SEQ ID NO: 2085
  source 1..451: note = XENP42721 Chain 1 - 1D7B4[NKG2D]_H1L1_Fab-38E2[B7H3]_L1.1_H2_scFv(GKPGS)4-IgG1_ pI(-)_Isosteric_A_S239D/L368D/K370S-Fc(216)_IgG1_C220S/S239 D/S364K/E357Q/

SEQ ID NO: 2092 - protein, 479 aa, synthetic construct
  source 1..479: note = XENP42721 Chain 2 - 1D7B4[NKG2D]_H1L1_Fab-38E2[B7H3]_L1.1_H2_scFv(GKPGS)4-IgG1_ pI(-)_Isosteric_A_S239D/L368D/K370S-Fc(216)_IgG1_C220S/S239 D/S364K/E357Q/
DIVMTQSPSSLSASVGDRVTITCRASQSINSWLSWYQQKPGKPPKLLIYGASNLASGVPSRFKGSGSGTDFTLTISSLQPEDFATYYCQNNYGIIAAGATFGGGTKVEIKGKPGSGKPGSGKPGSGKPGSEVQLLESGGGLVQPGGSLRLSCAVSGFSLSSYGVIWVRQAPGKGLEYVSWVSSGGSTNYASSVKGRFTISRDTSKNTVYLQMNSLRAEDTAVYFCARGATNSGTDIWGPGTLVTVSSEPKSSDKTHTCPPCPAPELLGGPDVFLFPPKPKDTLMISRTPEVTCVVVDVSHEDPEVKFNWYVDGVEVHNAKTKPREEQYNSTYRVVSVLTVLHQDWLNGKEYKCKVSNKALPAPIEKTISKAKGQPREPQVYTLPPSREQMTKNQVKLTCLVKGFYPSDIAVEWESNGQPENNYKTTPPVLDSDGSFFLYSKLTVDKSRWQQGNVFSCSVMHEALHNHYTQKSLSLSPGK

SEQ ID NO: 2093 - protein, 214 aa, synthetic construct; identical to SEQ ID NO: 3
  source 1..214: note = XENP42721 Chain 3 - 1D7B4[NKG2D]_H1L1_Fab-38E2[B7H3]_L1.1_H2_scFv(GKPGS)4-IgG1_ pI(-)_Isosteric_A_S239D/L368D/K370S-Fc(216)_IgG1_C220S/S239 D/S364K/E357Q/

SEQ ID NO: 2094 - protein, 451 aa, synthetic construct; identical to SEQ ID NO: 2088
  source 1..451: note = XENP42722 Chain 1 - 1D7B4[NKG2D]_H1L1_Fab-38E2[B7H3]_L1.1_H2_scFv(GKPGS)4-IgG1_ pI(-)_Isosteric_A_I332E/L368D/K370S-Fc(216)_IgG1_C220S/S239 D/S364K/E357Q

SEQ ID NO: 2095 - protein, 479 aa, synthetic construct; identical to SEQ ID NO: 2092
  source 1..479: note = XENP42722 Chain 2 - 1D7B4[NKG2D]_H1L1_Fab-38E2[B7H3]_L1.1_H2_scFv(GKPGS)4-IgG1_ pI(-)_Isosteric_A_I332E/L368D/K370S-Fc(216)_IgG1_C220S/S239 D/S364K/E357Q

SEQ ID NO: 2096 - protein, 214 aa, synthetic construct; identical to SEQ ID NO: 3
  source 1..214: note = XENP42722 Chain 3 - 1D7B4[NKG2D]_H1L1_Fab-38E2[B7H3]_L1.1_H2_scFv(GKPGS)4-IgG1_ pI(-)_Isosteric_A_I332E/L368D/K370S-Fc(216)_IgG1_C220S/S239 D/S364K/E357Q

SEQ ID NO: 2097 - protein, 450 aa, synthetic construct; identical to SEQ ID NO: 7
  source 1..450: note = XENP42723 Chain 1 - 1D7B4[NKG2D]_H1L1_Fab-2E4A3.189[B7H3]_L1_H1.22_scFv(GKPGS)4 -IgG1_pI(-)_Isosteric_A_PVA_/S267K/L368D/K370S-Fc(216)_IgG1 _C220S/PVA_/S267K/S364K/E357Q

SEQ ID NO: 2098 - protein, 477 aa, synthetic construct
  source 1..477: note = XENP42723 Chain 2 - 1D7B4[NKG2D]_H1L1_Fab-2E4A3.189[B7H3]_L1_H1.22_scFv(GKPGS)4 -IgG1_pI(-)_Isosteric_A_PVA_/S267K/L368D/K370S-Fc(216)_IgG1 _C220S/PVA_/S267K/S364K/E357Q
DIQMTQSPSSLSASVGDRVTITCRASQSISSYLNWYQQKPGKAPKLLIYAASSLQSGVPSRFSGSGSGTDFTLTISSLQPEDFATYYCQQSYSTPFTFGQGTKLEIKGKPGSGKPGSGKPGSGKPGSQVQLVQSGAEVKKPGASVKVSCKASGYIFTNNYMHWVRQAPGQGLEWMGIISPSVGRTAYAQKFQGRVTMTRDTSTSTVYMELSSLRSEDTAVYYCARGGGSSPRLDYWGQGTLVTVSSEPKSSDKTHTCPPCPAPPVAGPSVFLFPPKPKDTLMISRTPEVTCVVVDVKHEDPEVKFNWYVDGVEVHNAKTKPREEQYNSTYRVVSVLTVLHQDWLNGKEYKCKVSNKALPAPIEKTISKAKGQPREPQVYTLPPSREQMTKNQVKLTCLVKGFYPSDIAVEWESNGQPENNYKTTPPVLDSDGSFFLYSKLTVDKSRWQQGNVFSCSVMHEALHNHYTQKSLSLSPGK

SEQ ID NO: 2099 - protein, 214 aa, synthetic construct; identical to SEQ ID NO: 3
  source 1..214: note = XENP42723 Chain 3 - 1D7B4[NKG2D]_H1L1_Fab-2E4A3.189[B7H3]_L1_H1.22_scFv(GKPGS)4 -IgG1_pI(-)_Isosteric_A_PVA_/S267K/L368D/K370S-Fc(216)_IgG1 _C220S/PVA_/S267K/S364K/E357Q

SEQ ID NO: 2100 - protein, 451 aa, synthetic construct; identical to SEQ ID NO: 9
  source 1..451: note = XENP42724 Chain 1 - 1D7B4[NKG2D]_H1L1_Fab-2E4A3.189[B7H3]_L1_H1.22_scFv(GKPGS)4 -IgG1_pI(-)_Isosteric_A_L368D/K370S-Fc(216)_IgG1_C220S/S364 K/E357Q

SEQ ID NO: 2101 - protein, 478 aa, synthetic construct
  source 1..478: note = XENP42724 Chain 2 - 1D7B4[NKG2D]_H1L1_Fab-2E4A3.189[B7H3]_L1_H1.22_scFv(GKPGS)4 -IgG1_pI(-)_Isosteric_A_L368D/K370S-Fc(216)_IgG1_C220S/S364 K/E357Q
DIQMTQSPSSLSASVGDRVTITCRASQSISSYLNWYQQKPGKAPKLLIYAASSLQSGVPSRFSGSGSGTDFTLTISSLQPEDFATYYCQQSYSTPFTFGQGTKLEIKGKPGSGKPGSGKPGSGKPGSQVQLVQSGAEVKKPGASVKVSCKASGYIFTNNYMHWVRQAPGQGLEWMGIISPSVGRTAYAQKFQGRVTMTRDTSTSTVYMELSSLRSEDTAVYYCARGGGSSPRLDYWGQGTLVTVSSEPKSSDKTHTCPPCPAPELLGGPSVFLFPPKPKDTLMISRTPEVTCVVVDVSHEDPEVKFNWYVDGVEVHNAKTKPREEQYNSTYRVVSVLTVLHQDWLNGKEYKCKVSNKALPAPIEKTISKAKGQPREPQVYTLPPSREQMTKNQVKLTCLVKGFYPSDIAVEWESNGQPENNYKTTPPVLDSDGSFFLYSKLTVDKSRWQQGNVFSCSVMHEALHNHYTQKSLSLSPGK

SEQ ID NO: 2102 - protein, 214 aa, synthetic construct; identical to SEQ ID NO: 3
  source 1..214: note = XENP42724 Chain 3 - 1D7B4[NKG2D]_H1L1_Fab-2E4A3.189[B7H3]_L1_H1.22_scFv(GKPGS)4 -IgG1_pI(-)_Isosteric_A_L368D/K370S-Fc(216)_IgG1_C220S/S364 K/E357Q

SEQ ID NO: 2103 - protein, 451 aa, synthetic construct; identical to SEQ ID NO: 1
  source 1..451: note = XENP42725 Chain 1 - 1D7B4[NKG2D]_H1L1_Fab-2E4A3.189[B7H3]_L1_H1.22_scFv(GKPGS)4 -IgG1_pI(-)_Isosteric_A_S239D/I332E/L368D/K370S-Fc(216)_IgG 1_C220S/S239D/I332E/S364K/E357Q

SEQ ID NO: 2104 - protein, 478 aa, synthetic construct
  source 1..478: note = XENP42725 Chain 2 - 1D7B4[NKG2D]_H1L1_Fab-2E4A3.189[B7H3]_L1_H1.22_scFv(GKPGS)4 -IgG1_pI(-)_Isosteric_A_S239D/I332E/L368D/K370S-Fc(216)_IgG 1_C220S/S239D/I332E/S364K/E357Q
DIQMTQSPSSLSASVGDRVTITCRASQSISSYLNWYQQKPGKAPKLLIYAASSLQSGVPSRFSGSGSGTDFTLTISSLQPEDFATYYCQQSYSTPFTFGQGTKLEIKGKPGSGKPGSGKPGSGKPGSQVQLVQSGAEVKKPGASVKVSCKASGYIFTNNYMHWVRQAPGQGLEWMGIISPSVGRTAYAQKFQGRVTMTRDTSTSTVYMELSSLRSEDTAVYYCARGGGSSPRLDYWGQGTLVTVSSEPKSSDKTHTCPPCPAPELLGGPDVFLFPPKPKDTLMISRTPEVTCVVVDVSHEDPEVKFNWYVDGVEVHNAKTKPREEQYNSTYRVVSVLTVLHQDWLNGKEYKCKVSNKALPAPEEKTISKAKGQPREPQVYTLPPSREQMTKNQVKLTCLVKGFYPSDIAVEWESNGQPENNYKTTPPVLDSDGSFFLYSKLTVDKSRWQQGNVFSCSVMHEALHNHYTQKSLSLSPGK

SEQ ID NO: 2105 - protein, 214 aa, synthetic construct; identical to SEQ ID NO: 3
  source 1..214: note = XENP42725 Chain 3 - 1D7B4[NKG2D]_H1L1_Fab-2E4A3.189[B7H3]_L1_H1.22_scFv(GKPGS)4 -IgG1_pI(-)_Isosteric_A_S239D/I332E/L368D/K370S-Fc(216)_IgG 1_C220S/S239D/I332E/S364K/E357Q

SEQ ID NO: 2106 - protein, 448 aa, synthetic construct
  source 1..448: note = XENP42726 Chain 1 - 2E4A3.189[B7H3]_H1.22_L1_Fab-1D7B4[NKG2D]_H1L1_scFv(GKPGS)4 -IgG1_pI(-)_Isosteric_A_PVA_/S267K/L368D/K370S-Fc(216)_IgG1 _C220S/PVA_/S267K/S364K/E357Q
QVQLVQSGAEVKKPGASVKVSCKASGYIFTNNYMHWVRQAPGQGLEWMGIISPSVGRTAYAQKFQGRVTMTRDTSTSTVYMELSSLRSEDTAVYYCARGGGSSPRLDYWGQGTLVTVSSASTKGPSVFPLAPSSKSTSGGTAALGCLVKDYFPEPVTVSWNSGALTSGVHTFPAVLQSSGLYSLSSVVTVPSSSLGTQTYICNVNHKPSDTKVDKKVEPKSCDKTHTCPPCPAPPVAGPSVFLFPPKPKDTLMISRTPEVTCVVVDVKHEDPEVKFNWYVDGVEVHNAKTKPREEEYNSTYRVVSVLTVLHQDWLNGKEYKCKVSNKALPAPIEKTISKAKGQPREPQVYTLPPSREEMTKNQVSLTCDVSGFYPSDIAVEWESDGQPENNYKTTPPVLDSDGSFFLYSKLTVDKSRWEQGDVFSCSVMHEALHNHYTQKSLSLSPGK

SEQ ID NO: 2107 - protein, 479 aa, synthetic construct; identical to SEQ ID NO: 1039
  source 1..479: note = XENP42726 Chain 2 - 2E4A3.189[B7H3]_H1.22_L1_Fab-1D7B4[NKG2D]_H1L1_scFv(GKPGS)4 -IgG1_pI(-)_Isosteric_A_PVA_/S267K/L368D/K370S-Fc(216)_IgG1 _C220S/PVA_/S267K/S364K/E357Q

SEQ ID NO: 2108 - protein, 214 aa, synthetic construct
  source 1..214: note = XENP42726 Chain 3 - 2E4A3.189[B7H3]_H1.22_L1_Fab-1D7B4[NKG2D]_H1L1_scFv(GKPGS)4 -IgG1_pI(-)_Isosteric_A_PVA_/S267K/L368D/K370S-Fc(216)_IgG1 _C220S/PVA_/S267K/S364K/E357Q
DIQMTQSPSSLSASVGDRVTITCRASQSISSYLNWYQQKPGKAPKLLIYAASSLQSGVPSRFSGSGSGTDFTLTISSLQPEDFATYYCQQSYSTPFTFGQGTKLEIKRTVAAPSVFIFPPSDEQLKSGTASVVCLLNNFYPREAKVQWKVDNALQSGNSQESVTEQDSKDSTYSLSSTLTLSKADYEKHKVYACEVTHQGLSSPVTKSFNRGEC

SEQ ID NO: 2109 - protein, 449 aa, synthetic construct
  source 1..449: note = XENP42727 Chain 1 - 2E4A3.189[B7H3]_H1.22_L1_Fab-1D7B4[NKG2D]_H1L1_scFv(GKPGS)4 -IgG1_pI(-)_Isosteric_A_L368D/K370S-Fc(216)_IgG1_C220S/S364 K/E357Q
QVQLVQSGAEVKKPGASVKVSCKASGYIFTNNYMHWVRQAPGQGLEWMGIISPSVGRTAYAQKFQGRVTMTRDTSTSTVYMELSSLRSEDTAVYYCARGGGSSPRLDYWGQGTLVTVSSASTKGPSVFPLAPSSKSTSGGTAALGCLVKDYFPEPVTVSWNSGALTSGVHTFPAVLQSSGLYSLSSVVTVPSSSLGTQTYICNVNHKPSDTKVDKKVEPKSCDKTHTCPPCPAPELLGGPSVFLFPPKPKDTLMISRTPEVTCVVVDVSHEDPEVKFNWYVDGVEVHNAKTKPREEEYNSTYRVVSVLTVLHQDWLNGKEYKCKVSNKALPAPIEKTISKAKGQPREPQVYTLPPSREEMTKNQVSLTCDVSGFYPSDIAVEWESDGQPENNYKTTPPVLDSDGSFFLYSKLTVDKSRWEQGDVFSCSVMHEALHNHYTQKSLSLSPGK

SEQ ID NO: 2110 - protein, 480 aa, synthetic construct; identical to SEQ ID NO: 1037
  source 1..480: note = XENP42727 Chain 2 - 2E4A3.189[B7H3]_H1.22_L1_Fab-1D7B4[NKG2D]_H1L1_scFv(GKPGS)4 -IgG1_pI(-)_Isosteric_A_L368D/K370S-Fc(216)_IgG1_C220S/S364 K/E357Q

SEQ ID NO: 2111 - protein, 214 aa, synthetic construct; identical to SEQ ID NO: 2108
  source 1..214: note = XENP42727 Chain 3 - 2E4A3.189[B7H3]_H1.22_L1_Fab-1D7B4[NKG2D]_H1L1_scFv(GKPGS)4 -IgG1_pI(-)_Isosteric_A_L368D/K370S-Fc(216)_IgG1_C220S/S364 K/E357Q

SEQ ID NO: 2112 - protein, 449 aa, synthetic construct
  source 1..449: note = XENP42728 Chain 1 - 2E4A3.189[B7H3]_H1.22_L1_Fab-1D7B4[NKG2D]_H1L1_scFv(GKPGS)4 -IgG1_pI(-)_Isosteric_A_S239D/I332E/L368D/K370S-Fc(216)_IgG 1_C220S/S239D/I332E/S364K/E357Q
QVQLVQSGAEVKKPGASVKVSCKASGYIFTNNYMHWVRQAPGQGLEWMGIISPSVGRTAYAQKFQGRVTMTRDTSTSTVYMELSSLRSEDTAVYYCARGGGSSPRLDYWGQGTLVTVSSASTKGPSVFPLAPSSKSTSGGTAALGCLVKDYFPEPVTVSWNSGALTSGVHTFPAVLQSSGLYSLSSVVTVPSSSLGTQTYICNVNHKPSDTKVDKKVEPKSCDKTHTCPPCPAPELLGGPDVFLFPPKPKDTLMISRTPEVTCVVVDVSHEDPEVKFNWYVDGVEVHNAKTKPREEEYNSTYRVVSVLTVLHQDWLNGKEYKCKVSNKALPAPEEKTISKAKGQPREPQVYTLPPSREEMTKNQVSLTCDVSGFYPSDIAVEWESDGQPENNYKTTPPVLDSDGSFFLYSKLTVDKSRWEQGDVFSCSVMHEALHNHYTQKSLSLSPGK

SEQ ID NO: 2113 - protein, 480 aa, synthetic construct; identical to SEQ ID NO: 5
  source 1..480: note = XENP42728 Chain 2 - 2E4A3.189[B7H3]_H1.22_L1_Fab-1D7B4[NKG2D]_H1L1_scFv(GKPGS)4 -IgG1_pI(-)_Isosteric_A_S239D/I332E/L368D/K370S-Fc(216)_IgG 1_C220S/S239D/I332E/S364K/E357Q

SEQ ID NO: 2114 - protein, 214 aa, synthetic construct; identical to SEQ ID NO: 2108
  source 1..214: note = XENP42728 Chain 3 - 2E4A3.189[B7H3]_H1.22_L1_Fab-1D7B4[NKG2D]_H1L1_scFv(GKPGS)4 -IgG1_pI(-)_Isosteric_A_S239D/I332E/L368D/K370S-Fc(216)_IgG 1_C220S/S239D/I332E/S364K/E357Q

SEQ ID NO: 2115 - protein, 448 aa, synthetic construct; identical to SEQ ID NO: 2106
  source 1..448: note = XENP42729 Chain 1 - 2E4A3.189[B7H3]_H1.22_L1_Fab-1D7B4[NKG2D]_L1H1_scFv(GKPGS)4 -IgG1_pI(-)_Isosteric_A_PVA_/S267K/L368D/K370S-Fc(216)_IgG1 _C220S/PVA_/S267K/S364K/E357Q

SEQ ID NO: 2116 - protein, 479 aa, synthetic construct; identical to SEQ ID NO: 1799
  source 1..479: note = XENP42729 Chain 2 - 2E4A3.189[B7H3]_H1.22_L1_Fab-1D7B4[NKG2D]_L1H1_scFv(GKPGS)4 -IgG1_pI(-)_Isosteric_A_PVA_/S267K/L368D/K370S-Fc(216)_IgG1 _C220S/PVA_/S267K/S364K/E357Q

SEQ ID NO: 2117 - protein, 214 aa, synthetic construct; identical to SEQ ID NO: 2108
  source 1..214: note = XENP42729 Chain 3 - 2E4A3.189[B7H3]_H1.22_L1_Fab-1D7B4[NKG2D]_L1H1_scFv(GKPGS)4 -IgG1_pI(-)_Isosteric_A_PVA_/S267K/L368D/K370S-Fc(216)_IgG1 _C220S/PVA_/S267K/S364K/E357Q

SEQ ID NO: 2118 - protein, 449 aa, synthetic construct; identical to SEQ ID NO: 2109
  source 1..449: note = XENP42730 Chain 1 - 2E4A3.189[B7H3]_H1.22_L1_Fab-1D7B4[NKG2D]_L1H1_scFv(GKPGS)4 -IgG1_pI(-)_Isosteric_A_L368D/K370S-Fc(216)_IgG1_C220S/S364 K/E357Q

SEQ ID NO: 2119 - protein, 480 aa, synthetic construct; identical to SEQ ID NO: 1173
  source 1..480: note = XENP42730 Chain 2 - 2E4A3.189[B7H3]_H1.22_L1_Fab-1D7B4[NKG2D]_L1H1_scFv(GKPGS)4 -IgG1_pI(-)_Isosteric_A_L368D/K370S-Fc(216)_IgG1_C220S/S364 K/E357Q

SEQ ID NO: 2120 - protein, 214 aa, synthetic construct; identical to SEQ ID NO: 2108
  source 1..214: note = XENP42730 Chain 3 - 2E4A3.189[B7H3]_H1.22_L1_Fab-1D7B4[NKG2D]_L1H1_scFv(GKPGS)4 -IgG1_pI(-)_Isosteric_A_L368D/K370S-Fc(216)_IgG1_C220S/S364 K/E357Q

SEQ ID NO: 2121 - protein, 449 aa, synthetic construct; identical to SEQ ID NO: 2112
  source 1..449: note = XENP42731 Chain 1 - 2E4A3.189[B7H3]_H1.22_L1_Fab-1D7B4[NKG2D]_L1H1_scFv(GKPGS)4 -IgG1_pI(-)_Isosteric_A_S239D/I332E/L368D/K370S-Fc(216)_IgG 1_C220S/S239D/I332E/S364K/E357Q

SEQ ID NO: 2122 - protein, 480 aa, synthetic construct; identical to SEQ ID NO: 2083
  source 1..480: note = XENP42731 Chain 2 - 2E4A3.189[B7H3]_H1.22_L1_Fab-1D7B4[NKG2D]_L1H1_scFv(GKPGS)4 -IgG1_pI(-)_Isosteric_A_S239D/I332E/L368D/K370S-Fc(216)_IgG 1_C220S/S239D/I332E/S364K/E357Q

SEQ ID NO: 2123 - protein, 214 aa, synthetic construct; identical to SEQ ID NO: 2108
  source 1..214: note = XENP42731 Chain 3 - 2E4A3.189[B7H3]_H1.22_L1_Fab-1D7B4[NKG2D]_L1H1_scFv(GKPGS)4 -IgG1_pI(-)_Isosteric_A_S239D/I332E/L368D/K370S-Fc(216)_IgG 1_C220S/S239D/I332E/S364K/E357Q

SEQ ID NO: 2124 - protein, 450 aa, synthetic construct; identical to SEQ ID NO: 2001
  source 1..450: note = XENP42975 Chain 1 - Numax[RSV]_H1L1_Fab-1D7B4[NKG2D]_L1H1_scFv(GKPGS)4-IgG1_pI( -)_Isosteric_A_S239D/L368D/K370S-Fc(216)_IgG1_C220S/S239D/S 364K/E357Q

SEQ ID NO: 2125 - protein, 480 aa, synthetic construct; identical to SEQ ID NO: 2077
  source 1..480: note = XENP42975 Chain 2 - Numax[RSV]_H1L1_Fab-1D7B4[NKG2D]_L1H1_scFv(GKPGS)4-IgG1_pI( -)_Isosteric_A_S239D/L368D/K370S-Fc(216)_IgG1_C220S/S239D/S 364K/E357Q

SEQ ID NO: 2126 - protein, 213 aa, synthetic construct; identical to SEQ ID NO: 171
  source 1..213: note = XENP42975 Chain 3 - Numax[RSV]_H1L1_Fab-1D7B4[NKG2D]_L1H1_scFv(GKPGS)4-IgG1_pI( -)_Isosteric_A_S239D/L368D/K370S-Fc(216)_IgG1_C220S/S239D/S 364K/E357Q

SEQ ID NO: 2127 - protein, 450 aa, synthetic construct; identical to SEQ ID NO: 2004
  source 1..450: note = XENP42976 Chain 1 - Numax[RSV]_H1L1_Fab-1D7B4[NKG2D]_L1H1_scFv(GKPGS)4-IgG1_pI( -)_Isosteric_A_I332E/L368D/K370S-Fc(216)_IgG1_C220S/S239D/S 364K/E357Q

SEQ ID NO: 2128 - protein, 480 aa, synthetic construct; identical to SEQ ID NO: 2077
  source 1..480: note = XENP42976 Chain 2 - Numax[RSV]_H1L1_Fab-1D7B4[NKG2D]_L1H1_scFv(GKPGS)4-IgG1_pI( -)_Isosteric_A_I332E/L368D/K370S-Fc(216)_IgG1_C220S/S239D/S 364K/E357Q

SEQ ID NO: 2129 - protein, 213 aa, synthetic construct; identical to SEQ ID NO: 171
  source 1..213: note = XENP42976 Chain 3 - Numax[RSV]_H1L1_Fab-1D7B4[NKG2D]_L1H1_scFv(GKPGS)4-IgG1_pI( -)_Isosteric_A_I332E/L368D/K370S-Fc(216)_IgG1_C220S/S239D/S 364K/E357Q

SEQ ID NO: 2130 - protein, 450 aa, synthetic construct; identical to SEQ ID NO: 2001
  source 1..450: note = XENP42977 Chain 1 - Numax[RSV]_H1L1_Fab-Numax[RSV]_H1L1_Fab-IgG1_pI(-)_Isosteri c_A_S239D/L368D/K370S-IgG1_S239D/S364K/E357Q/K447del_(G4S)3 _1D7B4[NKG2D]_L1H1_scFv(GKPGS)4

SEQ ID NO: 2131 - protein, 712 aa, synthetic construct
  source 1..712: note = XENP42977 Chain 2 - Numax[RSV]_H1L1_Fab-Numax[RSV]_H1L1_Fab-IgG1_pI(-)_Isosteri c_A_S239D/L368D/K370S-IgG1_S239D/S364K/E357Q/K447del_(G4S)3 _1D7B4[NKG2D]_L1H1_scFv(GKPGS)4
QVTLRESGPALVKPTQTLTLTCTFSGFSLSTAGMSVGWIRQPPGKALEWLADIWWDDKKHYNPSLKDRLTISKDTSKNQVVLKVTNMDPADTATYYCARDMIFNFYFDVWGQGTTVTVSSASTKGPSVFPLAPSSKSTSGGTAALGCLVKDYFPEPVTVSWNSGALTSGVHTFPAVLQSSGLYSLSSVVTVPSSSLGTQTYICNVNHKPSNTKVDKKVEPKSCDKTHTCPPCPAPELLGGPDVFLFPPKPKDTLMISRTPEVTCVVVDVSHEDPEVKFNWYVDGVEVHNAKTKPREEQYNSTYRVVSVLTVLHQDWLNGKEYKCKVSNKALPAPIEKTISKAKGQPREPQVYTLPPSREQMTKNQVKLTCLVKGFYPSDIAVEWESNGQPENNYKTTPPVLDSDGSFFLYSKLTVDKSRWQQGNVFSCSVMHEALHNHYTQKSLSLSPGGGGGSGGGGSGGGGSDIQMTQSPSSLSASVGDRVTITCRASQSISSYLNWYQQKPGKAPKLLIYAASSLQSGVPSRFSGSGSGTDFTLTISSLQPEDFATYYCQQSYSTPYTFGQGTKLEIKGKPGSGKPGSGKPGSGKPGSEVQLLESGGGLVQPGGSLRLSCAASGFTFSSYAMSWVRQAPGKGLEWVSSISASGGSTYYADSVKGRFTISRDNSKNTLYLQMNSLRAEDTAVYYCAKGIFSIYFFYFDYWGQGTLVTVSS

SEQ ID NO: 2132 - protein, 213 aa, synthetic construct; identical to SEQ ID NO: 171
  source 1..213: note = XENP42977 Chain 3 - Numax[RSV]_H1L1_Fab-Numax[RSV]_H1L1_Fab-IgG1_pI(-)_Isosteri c_A_S239D/L368D/K370S-IgG1_S239D/S364K/E357Q/K447del_(G4S)3 _1D7B4[NKG2D]_L1H1_scFv(GKPGS)4

SEQ ID NO: 2133 - protein, 450 aa, synthetic construct; identical to SEQ ID NO: 2004
  source 1..450: note = XENP42978 Chain 1 - Numax[RSV]_H1L1_Fab-Numax[RSV]_H1L1_Fab-IgG1_pI(-)_Isosteri c_A_I332E/L368D/K370S-IgG1_S239D/S364K/E357Q/K447del_(G4S)3 _1D7B4[NKG2D]_L1H1_scFv(GKPGS)4

SEQ ID NO: 2134 - protein, 712 aa, synthetic construct; identical to SEQ ID NO: 2131
  source 1..712: note = XENP42978 Chain 2 - Numax[RSV]_H1L1_Fab-Numax[RSV]_H1L1_Fab-IgG1_pI(-)_Isosteri c_A_I332E/L368D/K370S-IgG1_S239D/S364K/E357Q/K447del_(G4S)3 _1D7B4[NKG2D]_L1H1_scFv(GKPGS)4

SEQ ID NO: 2135 - protein, 213 aa, synthetic construct; identical to SEQ ID NO: 171
  source 1..213: note = XENP42978 Chain 3 - Numax[RSV]_H1L1_Fab-Numax[RSV]_H1L1_Fab-IgG1_pI(-)_Isosteri c_A_I332E/L368D/K370S-IgG1_S239D/S364K/E357Q/K447del_(G4S)3 _1D7B4[NKG2D]_L1H1_scFv(GKPGS)4

SEQ ID NO: 2136 - protein, 447 aa, synthetic construct; identical to SEQ ID NO: 992
  source 1..447: note = XENP42979 Chain 1 - 38E2[B7H3]_H2_L1.1_Fab-38E2[B7H3]_H2_L1.1_Fab_1D7B4[NKG2D]_ L1_H1_scFv(GKPGS)4_(G4S)2-IgG1_pI(-)_Isosteric_A_S239D/L368 D/K370S-Fc(222)_IgG1_S239D/S364K/E357Q

SEQ ID NO: 2137 - protein, 714 aa, synthetic construct
  source 1..714: note = XENP42979 Chain 2 - 38E2[B7H3]_H2_L1.1_Fab-38E2[B7H3]_H2_L1.1_Fab_1D7B4[NKG2D]_ L1_H1_scFv(GKPGS)4_(G4S)2-IgG1_pI(-)_Isosteric_A_S239D/L368 D/K370S-Fc(222)_IgG1_S239D/S364K/E357Q
EVQLLESGGGLVQPGGSLRLSCAVSGFSLSSYGVIWVRQAPGKGLEYVSWVSSGGSTNYASSVKGRFTISRDTSKNTVYLQMNSLRAEDTAVYFCARGATNSGTDIWGPGTLVTVSSASTKGPSVFPLAPSSKSTSGGTAALGCLVKDYFPEPVTVSWNSGALTSGVHTFPAVLQSSGLYSLSSVVTVPSSSLGTQTYICNVNHKPSNTKVDKKVEPKSCGGGGSGGGGSDIQMTQSPSSLSASVGDRVTITCRASQSISSYLNWYQQKPGKAPKLLIYAASSLQSGVPSRFSGSGSGTDFTLTISSLQPEDFATYYCQQSYSTPYTFGQGTKLEIKGKPGSGKPGSGKPGSGKPGSEVQLLESGGGLVQPGGSLRLSCAASGFTFSSYAMSWVRQAPGKGLEWVSSISASGGSTYYADSVKGRFTISRDNSKNTLYLQMNSLRAEDTAVYYCAKGIFSIYFFYFDYWGQGTLVTVSSGGGGSGGGGSKTHTCPPCPAPELLGGPDVFLFPPKPKDTLMISRTPEVTCVVVDVSHEDPEVKFNWYVDGVEVHNAKTKPREEQYNSTYRVVSVLTVLHQDWLNGKEYKCKVSNKALPAPIEKTISKAKGQPREPQVYTLPPSREQMTKNQVKLTCLVKGFYPSDIAVEWESNGQPENNYKTTPPVLDSDGSFFLYSKLTVDKSRWQQGNVFSCSVMHEALHNHYTQKSLSLSPGK

SEQ ID NO: 2138 - protein, 217 aa, synthetic construct; identical to SEQ ID NO: 6
  source 1..217: note = XENP42979 Chain 3 - 38E2[B7H3]_H2_L1.1_Fab-38E2[B7H3]_H2_L1.1_Fab_1D7B4[NKG2D]_ L1_H1_scFv(GKPGS)4_(G4S)2-IgG1_pI(-)_Isosteric_A_S239D/L368 D/K370S-Fc(222)_IgG1_S239D/S364K/E357Q

SEQ ID NO: 2139 - protein, 447 aa, synthetic construct; identical to SEQ ID NO: 994
  source 1..447: note = XENP42980 Chain 1 - 38E2[B7H3]_H2_L1.1_Fab-38E2[B7H3]_H2_L1.1_Fab_1D7B4[NKG2D]_ L1_H1_scFv(GKPGS)4_(G4S)2-IgG1_pI(-)_Isosteric_A_I332E/L368 D/K370S-Fc(222)_IgG1_S239D/S364K/E357Q

SEQ ID NO: 2140 - protein, 714 aa, synthetic construct; identical to SEQ ID NO: 2137
  source 1..714: note = XENP42980 Chain 2 - 38E2[B7H3]_H2_L1.1_Fab-38E2[B7H3]_H2_L1.1_Fab_1D7B4[NKG2D]_ L1_H1_scFv(GKPGS)4_(G4S)2-IgG1_pI(-)_Isosteric_A_I332E/L368 D/K370S-Fc(222)_IgG1_S239D/S364K/E357Q

SEQ ID NO: 2141 - protein, 217 aa, synthetic construct; identical to SEQ ID NO: 6
  source 1..217: note = XENP42980 Chain 3 - 38E2[B7H3]_H2_L1.1_Fab-38E2[B7H3]_H2_L1.1_Fab_1D7B4[NKG2D]_ L1_H1_scFv(GKPGS)4_(G4S)2-IgG1_pI(-)_Isosteric_A_I332E/L368 D/K370S-Fc(222)_IgG1_S239D/S364K/E357Q

SEQ ID NO: 2142 - protein, 450 aa, synthetic construct; identical to SEQ ID NO: 2001
  source 1..450: note = XENP42981 Chain 1 - Numax[RSV]_H1L1_Fab-Numax[RSV]_H1L1_Fab_1D7B4[NKG2D]_L1_H1_ scFv(GKPGS)4_(G4S)2-IgG1_pI(-)_Isosteric_A_S239D/L368D/K370 S-Fc(222)_IgG1_S239D/S364K/E357Q

SEQ ID NO: 2143 - protein, 717 aa, synthetic construct
  source 1..717: note = XENP42981 Chain 2 - Numax[RSV]_H1L1_Fab-Numax[RSV]_H1L1_Fab_1D7B4[NKG2D]_L1_H1_ scFv(GKPGS)4_(G4S)2-IgG1_pI(-)_Isosteric_A_S239D/L368D/K370 S-Fc(222)_IgG1_S239D/S364K/E357Q
QVTLRESGPALVKPTQTLTLTCTFSGFSLSTAGMSVGWIRQPPGKALEWLADIWWDDKKHYNPSLKDRLTISKDTSKNQVVLKVTNMDPADTATYYCARDMIFNFYFDVWGQGTTVTVSSASTKGPSVFPLAPSSKSTSGGTAALGCLVKDYFPEPVTVSWNSGALTSGVHTFPAVLQSSGLYSLSSVVTVPSSSLGTQTYICNVNHKPSNTKVDKKVEPKSCGGGGSGGGGSDIQMTQSPSSLSASVGDRVTITCRASQSISSYLNWYQQKPGKAPKLLIYAASSLQSGVPSRFSGSGSGTDFTLTISSLQPEDFATYYCQQSYSTPYTFGQGTKLEIKGKPGSGKPGSGKPGSGKPGSEVQLLESGGGLVQPGGSLRLSCAASGFTFSSYAMSWVRQAPGKGLEWVSSISASGGSTYYADSVKGRFTISRDNSKNTLYLQMNSLRAEDTAVYYCAKGIFSIYFFYFDYWGQGTLVTVSSGGGGSGGGGSKTHTCPPCPAPELLGGPDVFLFPPKPKDTLMISRTPEVTCVVVDVSHEDPEVKFNWYVDGVEVHNAKTKPREEQYNSTYRVVSVLTVLHQDWLNGKEYKCKVSNKALPAPIEKTISKAKGQPREPQVYTLPPSREQMTKNQVKLTCLVKGFYPSDIAVEWESNGQPENNYKTTPPVLDSDGSFFLYSKLTVDKSRWQQGNVFSCSVMHEALHNHYTQKSLSLSPGK

SEQ ID NO: 2144 - protein, 213 aa, synthetic construct; identical to SEQ ID NO: 171
  source 1..213: note = XENP42981 Chain 3 - Numax[RSV]_H1L1_Fab-Numax[RSV]_H1L1_Fab_1D7B4[NKG2D]_L1_H1_ scFv(GKPGS)4_(G4S)2-IgG1_pI(-)_Isosteric_A_S239D/L368D/K370 S-Fc(222)_IgG1_S239D/S364K/E357Q

SEQ ID NO: 2145 - protein, 450 aa, synthetic construct; identical to SEQ ID NO: 2004
  source 1..450: note = XENP42982 Chain 1 - Numax[RSV]_H1L1_Fab-Numax[RSV]_H1L1_Fab_1D7B4[NKG2D]_L1_H1_ scFv(GKPGS)4_(G4S)2-IgG1_pI(-)_Isosteric_A_I332E/L368D/K370 S-Fc(222)_IgG1_S239D/S364K/E357Q

SEQ ID NO: 2146 - protein, 717 aa, synthetic construct; identical to SEQ ID NO: 2143
  source 1..717: note = XENP42982 Chain 2 - Numax[RSV]_H1L1_Fab-Numax[RSV]_H1L1_Fab_1D7B4[NKG2D]_L1_H1_ scFv(GKPGS)4_(G4S)2-IgG1_pI(-)_Isosteric_A_I332E/L368D/K370 S-Fc(222)_IgG1_S239D/S364K/E357Q

SEQ ID NO: 2147 - protein, 213 aa, synthetic construct; identical to SEQ ID NO: 171
  source 1..213: note = XENP42982 Chain 3 - Numax[RSV]_H1L1_Fab-Numax[RSV]_H1L1_Fab_1D7B4[NKG2D]_L1_H1_ scFv(GKPGS)4_(G4S)2-IgG1_pI(-)_Isosteric_A_I332E/L368D/K370 S-Fc(222)_IgG1_S239D/S364K/E357Q

SEQ ID NO: 2148 - protein, 677 aa, synthetic construct
  source 1..677: note = XENP42984 Chain 1 - 38E2[B7H3]_H2_L1.1_Fab_(G4S)2_38E2[B7H3]_H2_L1.1_Fab-1D7B4[ NKG2D]_L1H1_scFv(GKPGS)4-IgG1_pI(-)_Isosteric_A_I332E/L368D /K370S-Fc(216)_IgG1_C220S/S239D/S364K/E357Q
EVQLLESGGGLVQPGGSLRLSCAVSGFSLSSYGVIWVRQAPGKGLEYVSWVSSGGSTNYASSVKGRFTISRDTSKNTVYLQMNSLRAEDTAVYFCARGATNSGTDIWGPGTLVTVSSASTKGPSVFPLAPSSKSTSGGTAALGCLVKDYFPEPVTVSWNSGALTSGVHTFPAVLQSSGLYSLSSVVTVPSSSLGTQTYICNVNHKPSDTKVDKKVEPKSCGGGGSGGGGSEVQLLESGGGLVQPGGSLRLSCAVSGFSLSSYGVIWVRQAPGKGLEYVSWVSSGGSTNYASSVKGRFTISRDTSKNTVYLQMNSLRAEDTAVYFCARGATNSGTDIWGPGTLVTVSSASTKGPSVFPLAPSSKSTSGGTAALGCLVKDYFPEPVTVSWNSGALTSGVHTFPAVLQSSGLYSLSSVVTVPSSSLGTQTYICNVNHKPSDTKVDKKVEPKSCDKTHTCPPCPAPELLGGPSVFLFPPKPKDTLMISRTPEVTCVVVDVSHEDPEVKFNWYVDGVEVHNAKTKPREEEYNSTYRVVSVLTVLHQDWLNGKEYKCKVSNKALPAPEEKTISKAKGQPREPQVYTLPPSREEMTKNQVSLTCDVSGFYPSDIAVEWESDGQPENNYKTTPPVLDSDGSFFLYSKLTVDKSRWEQGDVFSCSVMHEALHNHYTQKSLSLSPGK

SEQ ID NO: 2149 - protein, 480 aa, synthetic construct; identical to SEQ ID NO: 2077
  source 1..480: note = XENP42984 Chain 2 - 38E2[B7H3]_H2_L1.1_Fab_(G4S)2_38E2[B7H3]_H2_L1.1_Fab-1D7B4[ NKG2D]_L1H1_scFv(GKPGS)4-IgG1_pI(-)_Isosteric_A_I332E/L368D /K370S-Fc(216)_IgG1_C220S/S239D/S364K/E357Q

SEQ ID NO: 2150 - protein, 217 aa, synthetic construct; identical to SEQ ID NO: 6
  source 1..217: note = XENP42984 Chain 3 - 38E2[B7H3]_H2_L1.1_Fab_(G4S)2_38E2[B7H3]_H2_L1.1_Fab-1D7B4[ NKG2D]_L1H1_scFv(GKPGS)4-IgG1_pI(-)_Isosteric_A_I332E/L368D /K370S-Fc(216)_IgG1_C220S/S239D/S364K/E357Q

SEQ ID NO: 2151 - protein, 683 aa, synthetic construct
  source 1..683: note = XENP42985 Chain 1 - Numax[RSV]_H1L1_Fab_(G4S)2_Numax[RSV]_H1L1_Fab-1D7B4[NKG2D] _L1H1_scFv(GKPGS)4-IgG1_pI(-)_Isosteric_A_S239D/L368D/K370S -Fc(216)_IgG1_C220S/S239D/S364K/E357Q
QVTLRESGPALVKPTQTLTLTCTFSGFSLSTAGMSVGWIRQPPGKALEWLADIWWDDKKHYNPSLKDRLTISKDTSKNQVVLKVTNMDPADTATYYCARDMIFNFYFDVWGQGTTVTVSSASTKGPSVFPLAPSSKSTSGGTAALGCLVKDYFPEPVTVSWNSGALTSGVHTFPAVLQSSGLYSLSSVVTVPSSSLGTQTYICNVNHKPSDTKVDKKVEPKSCGGGGSGGGGSQVTLRESGPALVKPTQTLTLTCTFSGFSLSTAGMSVGWIRQPPGKALEWLADIWWDDKKHYNPSLKDRLTISKDTSKNQVVLKVTNMDPADTATYYCARDMIFNFYFDVWGQGTTVTVSSASTKGPSVFPLAPSSKSTSGGTAALGCLVKDYFPEPVTVSWNSGALTSGVHTFPAVLQSSGLYSLSSVVTVPSSSLGTQTYICNVNHKPSDTKVDKKVEPKSCDKTHTCPPCPAPELLGGPDVFLFPPKPKDTLMISRTPEVTCVVVDVSHEDPEVKFNWYVDGVEVHNAKTKPREEEYNSTYRVVSVLTVLHQDWLNGKEYKCKVSNKALPAPIEKTISKAKGQPREPQVYTLPPSREEMTKNQVSLTCDVSGFYPSDIAVEWESDGQPENNYKTTPPVLDSDGSFFLYSKLTVDKSRWEQGDVFSCSVMHEALHNHYTQKSLSLSPGK

SEQ ID NO: 2152 - protein, 480 aa, synthetic construct; identical to SEQ ID NO: 2077
  source 1..480: note = XENP42985 Chain 2 - Numax[RSV]_H1L1_Fab_(G4S)2_Numax[RSV]_H1L1_Fab-1D7B4[NKG2D] _L1H1_scFv(GKPGS)4-IgG1_pI(-)_Isosteric_A_S239D/L368D/K370S -Fc(216)_IgG1_C220S/S239D/S364K/E357Q

SEQ ID NO: 2153 - protein, 213 aa, synthetic construct; identical to SEQ ID NO: 171
  source 1..213: note = XENP42985 Chain 3 - Numax[RSV]_H1L1_Fab_(G4S)2_Numax[RSV]_H1L1_Fab-1D7B4[NKG2D] _L1H1_scFv(GKPGS)4-IgG1_pI(-)_Isosteric_A_S239D/L368D/K370S -Fc(216)_IgG1_C220S/S239D/S364K/E357Q

SEQ ID NO: 2154 - protein, 683 aa, synthetic construct
  source 1..683: note = XENP42986 Chain 1 - Numax[RSV]_H1L1_Fab_(G4S)2_Numax[RSV]_H1L1_Fab-1D7B4[NKG2D] _L1H1_scFv(GKPGS)4-IgG1_pI(-)_Isosteric_A_I332E/L368D/K370S -Fc(216)_IgG1_C220S/S239D/S364K/E357Q
QVTLRESGPALVKPTQTLTLTCTFSGFSLSTAGMSVGWIRQPPGKALEWLADIWWDDKKHYNPSLKDRLTISKDTSKNQVVLKVTNMDPADTATYYCARDMIFNFYFDVWGQGTTVTVSSASTKGPSVFPLAPSSKSTSGGTAALGCLVKDYFPEPVTVSWNSGALTSGVHTFPAVLQSSGLYSLSSVVTVPSSSLGTQTYICNVNHKPSDTKVDKKVEPKSCGGGGSGGGGSQVTLRESGPALVKPTQTLTLTCTFSGFSLSTAGMSVGWIRQPPGKALEWLADIWWDDKKHYNPSLKDRLTISKDTSKNQVVLKVTNMDPADTATYYCARDMIFNFYFDVWGQGTTVTVSSASTKGPSVFPLAPSSKSTSGGTAALGCLVKDYFPEPVTVSWNSGALTSGVHTFPAVLQSSGLYSLSSVVTVPSSSLGTQTYICNVNHKPSDTKVDKKVEPKSCDKTHTCPPCPAPELLGGPSVFLFPPKPKDTLMISRTPEVTCVVVDVSHEDPEVKFNWYVDGVEVHNAKTKPREEEYNSTYRVVSVLTVLHQDWLNGKEYKCKVSNKALPAPEEKTISKAKGQPREPQVYTLPPSREEMTKNQVSLTCDVSGFYPSDIAVEWESDGQPENNYKTTPPVLDSDGSFFLYSKLTVDKSRWEQGDVFSCSVMHEALHNHYTQKSLSLSPGK

SEQ ID NO: 2155 - protein, 480 aa, synthetic construct; identical to SEQ ID NO: 2077
  source 1..480: note = XENP42986 Chain 2 - Numax[RSV]_H1L1_Fab_(G4S)2_Numax[RSV]_H1L1_Fab-1D7B4[NKG2D] _L1H1_scFv(GKPGS)4-IgG1_pI(-)_Isosteric_A_I332E/L368D/K370S -Fc(216)_IgG1_C220S/S239D/S364K/E357Q

SEQ ID NO: 2156 - protein, 213 aa, synthetic construct; identical to SEQ ID NO: 171
  source 1..213: note = XENP42986 Chain 3 - Numax[RSV]_H1L1_Fab_(G4S)2_Numax[RSV]_H1L1_Fab-1D7B4[NKG2D] _L1H1_scFv(GKPGS)4-IgG1_pI(-)_Isosteric_A_I332E/L368D/K370S -Fc(216)_IgG1_C220S/S239D/S364K/E357Q

SEQ ID NO: 2157 - protein, 447 aa, synthetic construct; identical to SEQ ID NO: 992
  source 1..447: note = XENP43121 Chain 1 - 38E2[B7H3]_H2_L1.1_Fab-38E2[B7H3]_H2_L1.1_Fab-IgG1_pI(-)_Is osteric_A_S239D/L368D/K370S-IgG1_S239D/S364K/E357Q/K447del_ (G4S)3_1D7B4[NKG2D]_H1_L1_scFv(GKPGS)4

SEQ ID NO: 2158 - protein, 709 aa, synthetic construct
  source 1..709: note = XENP43121 Chain 2 - 38E2[B7H3]_H2_L1.1_Fab-38E2[B7H3]_H2_L1.1_Fab-IgG1_pI(-)_Is osteric_A_S239D/L368D/K370S-IgG1_S239D/S364K/E357Q/K447del_ (G4S)3_1D7B4[NKG2D]_H1_L1_scFv(GKPGS)4
EVQLLESGGGLVQPGGSLRLSCAVSGFSLSSYGVIWVRQAPGKGLEYVSWVSSGGSTNYASSVKGRFTISRDTSKNTVYLQMNSLRAEDTAVYFCARGATNSGTDIWGPGTLVTVSSASTKGPSVFPLAPSSKSTSGGTAALGCLVKDYFPEPVTVSWNSGALTSGVHTFPAVLQSSGLYSLSSVVTVPSSSLGTQTYICNVNHKPSNTKVDKKVEPKSCDKTHTCPPCPAPELLGGPDVFLFPPKPKDTLMISRTPEVTCVVVDVSHEDPEVKFNWYVDGVEVHNAKTKPREEQYNSTYRVVSVLTVLHQDWLNGKEYKCKVSNKALPAPIEKTISKAKGQPREPQVYTLPPSREQMTKNQVKLTCLVKGFYPSDIAVEWESNGQPENNYKTTPPVLDSDGSFFLYSKLTVDKSRWQQGNVFSCSVMHEALHNHYTQKSLSLSPGGGGGSGGGGSGGGGSEVQLLESGGGLVQPGGSLRLSCAASGFTFSSYAMSWVRQAPGKGLEWVSSISASGGSTYYADSVKGRFTISRDNSKNTLYLQMNSLRAEDTAVYYCAKGIFSIYFFYFDYWGQGTLVTVSSGKPGSGKPGSGKPGSGKPGSDIQMTQSPSSLSASVGDRVTITCRASQSISSYLNWYQQKPGKAPKLLIYAASSLQSGVPSRFSGSGSGTDFTLTISSLQPEDFATYYCQQSYSTPYTFGQGTKLEIK

SEQ ID NO: 2159 - protein, 217 aa, synthetic construct; identical to SEQ ID NO: 6
  source 1..217: note = XENP43121 Chain 3 - 38E2[B7H3]_H2_L1.1_Fab-38E2[B7H3]_H2_L1.1_Fab-IgG1_pI(-)_Is osteric_A_S239D/L368D/K370S-IgG1_S239D/S364K/E357Q/K447del_ (G4S)3_1D7B4[NKG2D]_H1_L1_scFv(GKPGS)4

SEQ ID NO: 2160 - protein, 447 aa, synthetic construct; identical to SEQ ID NO: 994
  source 1..447: note = XENP43122 Chain 1 - 38E2[B7H3]_H2_L1.1_Fab-38E2[B7H3]_H2_L1.1_Fab-IgG1_pI(-)_Is osteric_A_I332E/L368D/K370S-IgG1_S239D/S364K/E357Q/K447del_ (G4S)3_1D7B4[NKG2D]_H1_L1_scFv(GKPGS)4

SEQ ID NO: 2161 - protein, 709 aa, synthetic construct; identical to SEQ ID NO: 2158
  source 1..709: note = XENP43122 Chain 2 - 38E2[B7H3]_H2_L1.1_Fab-38E2[B7H3]_H2_L1.1_Fab-IgG1_pI(-)_Is osteric_A_I332E/L368D/K370S-IgG1_S239D/S364K/E357Q/K447del_ (G4S)3_1D7B4[NKG2D]_H1_L1_scFv(GKPGS)4

SEQ ID NO: 2162 - protein, 217 aa, synthetic construct; identical to SEQ ID NO: 6
  source 1..217: note = XENP43122 Chain 3 - 38E2[B7H3]_H2_L1.1_Fab-38E2[B7H3]_H2_L1.1_Fab-IgG1_pI(-)_Is osteric_A_I332E/L368D/K370S-IgG1_S239D/S364K/E357Q/K447del_ (G4S)3_1D7B4[NKG2D]_H1_L1_scFv(GKPGS)4

SEQ ID NO: 2163 - protein, 446 aa, synthetic construct; identical to SEQ ID NO: 1038
  source 1..446: note = XENP43345 Chain 1 - 38E2[B7H3]_H2_L1.1_Fab-1D7B4[NKG2D]_H1.3_L1_scFv(GKPGS)4-Ig G1_pI(-)_Isosteric_A_PVA_/S267K/L368D/K370S-Fc(216)_IgG1_C2 20S/PVA_/S267K/S364K/E357Q

SEQ ID NO: 2164 - protein, 479 aa, synthetic construct
  source 1..479: note = XENP43345 Chain 2 - 38E2[B7H3]_H2_L1.1_Fab-1D7B4[NKG2D]_H1.3_L1_scFv(GKPGS)4-Ig G1_pI(-)_Isosteric_A_PVA_/S267K/L368D/K370S-Fc(216)_IgG1_C2 20S/PVA_/S267K/S364K/E357Q
EVQLLESGGGLVQPGGSLRLSCAASGFTFSSSAMSWVRQAPGKGLEWVSSISASGGSTYYADSVKGRFTISRDNSKNTLYLQMNSLRAEDTAVYYCAKGIFSIYFFYFDYWGQGTLVTVSSGKPGSGKPGSGKPGSGKPGSDIQMTQSPSSLSASVGDRVTITCRASQSISSYLNWYQQKPGKAPKLLIYAASSLQSGVPSRFSGSGSGTDFTLTISSLQPEDFATYYCQQSYSTPYTFGQGTKLEIKEPKSSDKTHTCPPCPAPPVAGPSVFLFPPKPKDTLMISRTPEVTCVVVDVKHEDPEVKFNWYVDGVEVHNAKTKPREEQYNSTYRVVSVLTVLHQDWLNGKEYKCKVSNKALPAPIEKTISKAKGQPREPQVYTLPPSREQMTKNQVKLTCLVKGFYPSDIAVEWESNGQPENNYKTTPPVLDSDGSFFLYSKLTVDKSRWQQGNVFSCSVMHEALHNHYTQKSLSLSPGK

SEQ ID NO: 2165 - protein, 217 aa, synthetic construct; identical to SEQ ID NO: 6
  source 1..217: note = XENP43345 Chain 3 - 38E2[B7H3]_H2_L1.1_Fab-1D7B4[NKG2D]_H1.3_L1_scFv(GKPGS)4-Ig G1_pI(-)_Isosteric_A_PVA_/S267K/L368D/K370S-Fc(216)_IgG1_C2 20S/PVA_/S267K/S364K/E357Q

SEQ ID NO: 2166 - protein, 446 aa, synthetic construct; identical to SEQ ID NO: 1038
  source 1..446: note = XENP43346 Chain 1 - 38E2[B7H3]_H2_L1.1_Fab-1D7B4[NKG2D]_H1.23_L1_scFv(GKPGS)4-I gG1_pI(-)_Isosteric_A_PVA_/S267K/L368D/K370S-Fc(216)_IgG1_C 220S/PVA_/S267K/S364K/E357Q

SEQ ID NO: 2167 - protein, 479 aa, synthetic construct
  source 1..479: note = XENP43346 Chain 2 - 38E2[B7H3]_H2_L1.1_Fab-1D7B4[NKG2D]_H1.23_L1_scFv(GKPGS)4-I gG1_pI(-)_Isosteric_A_PVA_/S267K/L368D/K370S-Fc(216)_IgG1_C 220S/PVA_/S267K/S364K/E357Q
EVQLLESGGGLVQPGGSLRLSCAASGFTFSSYAMSWVRQAPGKGLEWVSSISASGGSTYYADSVKGRFTISRDNSKNTLYLQMNSLRAEDTAVYYCAKGIFAIYFFYFDYWGQGTLVTVSSGKPGSGKPGSGKPGSGKPGSDIQMTQSPSSLSASVGDRVTITCRASQSISSYLNWYQQKPGKAPKLLIYAASSLQSGVPSRFSGSGSGTDFTLTISSLQPEDFATYYCQQSYSTPYTFGQGTKLEIKEPKSSDKTHTCPPCPAPPVAGPSVFLFPPKPKDTLMISRTPEVTCVVVDVKHEDPEVKFNWYVDGVEVHNAKTKPREEQYNSTYRVVSVLTVLHQDWLNGKEYKCKVSNKALPAPIEKTISKAKGQPREPQVYTLPPSREQMTKNQVKLTCLVKGFYPSDIAVEWESNGQPENNYKTTPPVLDSDGSFFLYSKLTVDKSRWQQGNVFSCSVMHEALHNHYTQKSLSLSPGK

SEQ ID NO: 2168 - protein, 217 aa, synthetic construct; identical to SEQ ID NO: 6
  source 1..217: note = XENP43346 Chain 3 - 38E2[B7H3]_H2_L1.1_Fab-1D7B4[NKG2D]_H1.23_L1_scFv(GKPGS)4-I gG1_pI(-)_Isosteric_A_PVA_/S267K/L368D/K370S-Fc(216)_IgG1_C 220S/PVA_/S267K/S364K/E357Q

SEQ ID NO: 2169 - protein, 446 aa, synthetic construct; identical to SEQ ID NO: 1038
  source 1..446: note = XENP43347 Chain 1 - 38E2[B7H3]_H2_L1.1_Fab-1D7B4[NKG2D]_H1.28_L1_scFv(GKPGS)4-I gG1_pI(-)_Isosteric_A_PVA_/S267K/L368D/K370S-Fc(216)_IgG1_C 220S/PVA_/S267K/S364K/E357Q

SEQ ID NO: 2170 - protein, 479 aa, synthetic construct
  source 1..479: note = XENP43347 Chain 2 - 38E2[B7H3]_H2_L1.1_Fab-1D7B4[NKG2D]_H1.28_L1_scFv(GKPGS)4-I gG1_pI(-)_Isosteric_A_PVA_/S267K/L368D/K370S-Fc(216)_IgG1_C 220S/PVA_/S267K/S364K/E357Q
EVQLLESGGGLVQPGGSLRLSCAASGFTFSSYAMSWVRQAPGKGLEWVSSISASGGSTYYADSVKGRFTISRDNSKNTLYLQMNSLRAEDTAVYYCAKGIFSHYFFYFDYWGQGTLVTVSSGKPGSGKPGSGKPGSGKPGSDIQMTQSPSSLSASVGDRVTITCRASQSISSYLNWYQQKPGKAPKLLIYAASSLQSGVPSRFSGSGSGTDFTLTISSLQPEDFATYYCQQSYSTPYTFGQGTKLEIKEPKSSDKTHTCPPCPAPPVAGPSVFLFPPKPKDTLMISRTPEVTCVVVDVKHEDPEVKFNWYVDGVEVHNAKTKPREEQYNSTYRVVSVLTVLHQDWLNGKEYKCKVSNKALPAPIEKTISKAKGQPREPQVYTLPPSREQMTKNQVKLTCLVKGFYPSDIAVEWESNGQPENNYKTTPPVLDSDGSFFLYSKLTVDKSRWQQGNVFSCSVMHEALHNHYTQKSLSLSPGK

SEQ ID NO: 2171 - protein, 217 aa, synthetic construct; identical to SEQ ID NO: 6
  source 1..217: note = XENP43347 Chain 3 - 38E2[B7H3]_H2_L1.1_Fab-1D7B4[NKG2D]_H1.28_L1_scFv(GKPGS)4-I gG1_pI(-)_Isosteric_A_PVA_/S267K/L368D/K370S-Fc(216)_IgG1_C 220S/PVA_/S267K/S364K/E357Q

SEQ ID NO: 2172 - protein, 446 aa, synthetic construct; identical to SEQ ID NO: 1038
  source 1..446: note = XENP43348 Chain 1 - 38E2[B7H3]_H2_L1.1_Fab-1D7B4[NKG2D]_H1.31_L1_scFv(GKPGS)4-I gG1_pI(-)_Isosteric_A_PVA_/S267K/L368D/K370S-Fc(216)_IgG1_C 220S/PVA_/S267K/S364K/E357Q

SEQ ID NO: 2173 - protein, 479 aa, synthetic construct
  source 1..479: note = XENP43348 Chain 2 - 38E2[B7H3]_H2_L1.1_Fab-1D7B4[NKG2D]_H1.31_L1_scFv(GKPGS)4-I gG1_pI(-)_Isosteric_A_PVA_/S267K/L368D/K370S-Fc(216)_IgG1_C 220S/PVA_/S267K/S364K/E357Q
EVQLLESGGGLVQPGGSLRLSCAASGFTFSSYAMSWVRQAPGKGLEWVSSISASGGSTYYADSVKGRFTISRDNSKNTLYLQMNSLRAEDTAVYYCAKGIFSIAFFYFDYWGQGTLVTVSSGKPGSGKPGSGKPGSGKPGSDIQMTQSPSSLSASVGDRVTITCRASQSISSYLNWYQQKPGKAPKLLIYAASSLQSGVPSRFSGSGSGTDFTLTISSLQPEDFATYYCQQSYSTPYTFGQGTKLEIKEPKSSDKTHTCPPCPAPPVAGPSVFLFPPKPKDTLMISRTPEVTCVVVDVKHEDPEVKFNWYVDGVEVHNAKTKPREEQYNSTYRVVSVLTVLHQDWLNGKEYKCKVSNKALPAPIEKTISKAKGQPREPQVYTLPPSREQMTKNQVKLTCLVKGFYPSDIAVEWESNGQPENNYKTTPPVLDSDGSFFLYSKLTVDKSRWQQGNVFSCSVMHEALHNHYTQKSLSLSPGK

SEQ ID NO: 2174 - protein, 217 aa, synthetic construct; identical to SEQ ID NO: 6
  source 1..217: note = XENP43348 Chain 3 - 38E2[B7H3]_H2_L1.1_Fab-1D7B4[NKG2D]_H1.31_L1_scFv(GKPGS)4-I gG1_pI(-)_Isosteric_A_PVA_/S267K/L368D/K370S-Fc(216)_IgG1_C 220S/PVA_/S267K/S364K/E357Q

SEQ ID NO: 2175 - protein, 446 aa, synthetic construct; identical to SEQ ID NO: 1038
  source 1..446: note = XENP43349 Chain 1 - 38E2[B7H3]_H2_L1.1_Fab-1D7B4[NKG2D]_H1.33_L1_scFv(GKPGS)4-I gG1_pI(-)_Isosteric_A_PVA_/S267K/L368D/K370S-Fc(216)_IgG1_C 220S/PVA_/S267K/S364K/E357Q

SEQ ID NO: 2176 - protein, 479 aa, synthetic construct
  source 1..479: note = XENP43349 Chain 2 - 38E2[B7H3]_H2_L1.1_Fab-1D7B4[NKG2D]_H1.33_L1_scFv(GKPGS)4-I gG1_pI(-)_Isosteric_A_PVA_/S267K/L368D/K370S-Fc(216)_IgG1_C 220S/PVA_/S267K/S364K/E357Q
EVQLLESGGGLVQPGGSLRLSCAASGFTFSSYAMSWVRQAPGKGLEWVSSISASGGSTYYADSVKGRFTISRDNSKNTLYLQMNSLRAEDTAVYYCAKGIFSIEFFYFDYWGQGTLVTVSSGKPGSGKPGSGKPGSGKPGSDIQMTQSPSSLSASVGDRVTITCRASQSISSYLNWYQQKPGKAPKLLIYAASSLQSGVPSRFSGSGSGTDFTLTISSLQPEDFATYYCQQSYSTPYTFGQGTKLEIKEPKSSDKTHTCPPCPAPPVAGPSVFLFPPKPKDTLMISRTPEVTCVVVDVKHEDPEVKFNWYVDGVEVHNAKTKPREEQYNSTYRVVSVLTVLHQDWLNGKEYKCKVSNKALPAPIEKTISKAKGQPREPQVYTLPPSREQMTKNQVKLTCLVKGFYPSDIAVEWESNGQPENNYKTTPPVLDSDGSFFLYSKLTVDKSRWQQGNVFSCSVMHEALHNHYTQKSLSLSPGK

SEQ ID NO: 2177 - protein, 217 aa, synthetic construct; identical to SEQ ID NO: 6
  source 1..217: note = XENP43349 Chain 3 - 38E2[B7H3]_H2_L1.1_Fab-1D7B4[NKG2D]_H1.33_L1_scFv(GKPGS)4-I gG1_pI(-)_Isosteric_A_PVA_/S267K/L368D/K370S-Fc(216)_IgG1_C 220S/PVA_/S267K/S364K/E357Q

SEQ ID NO: 2178 - protein, 446 aa, synthetic construct; identical to SEQ ID NO: 1038
  source 1..446: note = XENP43350 Chain 1 - 38E2[B7H3]_H2_L1.1_Fab-1D7B4[NKG2D]_H1.42_L1_scFv(GKPGS)4-I gG1_pI(-)_Isosteric_A_PVA_/S267K/L368D/K370S-Fc(216)_IgG1_C 220S/PVA_/S267K/S364K/E357Q

SEQ ID NO: 2179 - protein, 479 aa, synthetic construct
  source 1..479: note = XENP43350 Chain 2 - 38E2[B7H3]_H2_L1.1_Fab-1D7B4[NKG2D]_H1.42_L1_scFv(GKPGS)4-I gG1_pI(-)_Isosteric_A_PVA_/S267K/L368D/K370S-Fc(216)_IgG1_C 220S/PVA_/S267K/S364K/E357Q
EVQLLESGGGLVQPGGSLRLSCAASGFTFSSYAMSWVRQAPGKGLEWVSSISASGGSTYYADSVKGRFTISRDNSKNTLYLQMNSLRAEDTAVYYCAKGIFSIYFHYFDYWGQGTLVTVSSGKPGSGKPGSGKPGSGKPGSDIQMTQSPSSLSASVGDRVTITCRASQSISSYLNWYQQKPGKAPKLLIYAASSLQSGVPSRFSGSGSGTDFTLTISSLQPEDFATYYCQQSYSTPYTFGQGTKLEIKEPKSSDKTHTCPPCPAPPVAGPSVFLFPPKPKDTLMISRTPEVTCVVVDVKHEDPEVKFNWYVDGVEVHNAKTKPREEQYNSTYRVVSVLTVLHQDWLNGKEYKCKVSNKALPAPIEKTISKAKGQPREPQVYTLPPSREQMTKNQVKLTCLVKGFYPSDIAVEWESNGQPENNYKTTPPVLDSDGSFFLYSKLTVDKSRWQQGNVFSCSVMHEALHNHYTQKSLSLSPGK

SEQ ID NO: 2180 - protein, 217 aa, synthetic construct; identical to SEQ ID NO: 6
  source 1..217: note = XENP43350 Chain 3 - 38E2[B7H3]_H2_L1.1_Fab-1D7B4[NKG2D]_H1.42_L1_scFv(GKPGS)4-I gG1_pI(-)_Isosteric_A_PVA_/S267K/L368D/K370S-Fc(216)_IgG1_C 220S/PVA_/S267K/S364K/E357Q

SEQ ID NO: 2181 - protein, 447 aa, synthetic construct
  source 1..447: note = XENP43406 Chain 1 - 38E2[B7H3]_H2_L1.1_Fab-1D7B4[NKG2D]_H1_L1_scFv(GKPGS)4-mIgG 2aa_T370K/K409R-Fc(216)_huIgG1_mIgG2aa_Hinge(KasI)_F405L/R4 11T
EVQLLESGGGLVQPGGSLRLSCAVSGFSLSSYGVIWVRQAPGKGLEYVSWVSSGGSTNYASSVKGRFTISRDTSKNTVYLQMNSLRAEDTAVYFCARGATNSGTDIWGPGTLVTVSSAKTTAPSVYPLAPVCGDTTGSSVTLGCLVKGYFPEPVTLTWNSGSLSSGVHTFPAVLQSDLYTLSSSVTVTSSTWPSQSITCNVAHPASSTKVDKKIEPRGPTIKPCPPCKCPAPNLLGGPSVFIFPPKIKDVLMISLSPMVTCVVVDVSEDDPDVQISWFVNNVEVLTAQTQTHREDYNSTLRVVSALPIQHQDWMSGKEFKCKVNNKALPAPIERTISKPKGSVRAPQVYVLPPPEEEMTKKQVTLTCMVKDFMPEDIYVEWTNNGKTELNYKNTEPVLDSDGSYFMYSRLRVEKKNWVERNSYSCSVVHEGLHNHHTTKSFSRTPGK

SEQ ID NO: 2182 - protein, 480 aa, synthetic construct
  source 1..480: note = XENP43406 Chain 2 - 38E2[B7H3]_H2_L1.1_Fab-1D7B4[NKG2D]_H1_L1_scFv(GKPGS)4-mIgG 2aa_T370K/K409R-Fc(216)_huIgG1_mIgG2aa_Hinge(KasI)_F405L/R4 11T
EVQLLESGGGLVQPGGSLRLSCAASGFTFSSYAMSWVRQAPGKGLEWVSSISASGGSTYYADSVKGRFTISRDNSKNTLYLQMNSLRAEDTAVYYCAKGIFSIYFFYFDYWGQGTLVTVSSGKPGSGKPGSGKPGSGKPGSDIQMTQSPSSLSASVGDRVTITCRASQSISSYLNWYQQKPGKAPKLLIYAASSLQSGVPSRFSGSGSGTDFTLTISSLQPEDFATYYCQQSYSTPYTFGQGTKLEIKEPKSSDKTHTCPPCPAPNLLGGPSVFIFPPKIKDVLMISLSPMVTCVVVDVSEDDPDVQISWFVNNVEVLTAQTQTHREDYNSTLRVVSALPIQHQDWMSGKEFKCKVNNKALPAPIERTISKPKGSVRAPQVYVLPPPEEEMTKKQVTLTCMVTDFMPEDIYVEWTNNGKTELNYKNTEPVLDSDGSYLMYSKLTVEKKNWVERNSYSCSVVHEGLHNHHTTKSFSRTPGK

SEQ ID NO: 2183 - protein, 217 aa, synthetic construct
  source 1..217: note = XENP43406 Chain 3 - 38E2[B7H3]_H2_L1.1_Fab-1D7B4[NKG2D]_H1_L1_scFv(GKPGS)4-mIgG 2aa_T370K/K409R-Fc(216)_huIgG1_mIgG2aa_Hinge(KasI)_F405L/R4 11T
DIVMTQSPSSLSASVGDRVTITCRASQSINSWLSWYQQKPGKPPKLLIYGASNLASGVPSRFKGSGSGTDFTLTISSLQPEDFATYYCQNNYGIIAAGATFGGGTKVEIKRADAAPTVSIFPPSSEQLTSGGASVVCFLNNFYPKDINVKWKIDGSERQNGVLNSWTDQDSKDSTYSMSSTLTLTKDEYERHNSYTCEATHKTSTSPIVKSFNRNEC

SEQ ID NO: 2184 - protein, 447 aa, synthetic construct
  source 1..447: note = XENP43407 Chain 1 - 38E2[B7H3]_H2_L1.1_Fab-1D7B4[NKG2D]_H1_L1_scFv(GKPGS)4-mIgG 2aa_F405L/R411T-Fc(216)_huIgG1_mIgG2aa_Hinge(KasI)_T370K/K4 09R
EVQLLESGGGLVQPGGSLRLSCAVSGFSLSSYGVIWVRQAPGKGLEYVSWVSSGGSTNYASSVKGRFTISRDTSKNTVYLQMNSLRAEDTAVYFCARGATNSGTDIWGPGTLVTVSSAKTTAPSVYPLAPVCGDTTGSSVTLGCLVKGYFPEPVTLTWNSGSLSSGVHTFPAVLQSDLYTLSSSVTVTSSTWPSQSITCNVAHPASSTKVDKKIEPRGPTIKPCPPCKCPAPNLLGGPSVFIFPPKIKDVLMISLSPMVTCVVVDVSEDDPDVQISWFVNNVEVLTAQTQTHREDYNSTLRVVSALPIQHQDWMSGKEFKCKVNNKALPAPIERTISKPKGSVRAPQVYVLPPPEEEMTKKQVTLTCMVTDFMPEDIYVEWTNNGKTELNYKNTEPVLDSDGSYLMYSKLTVEKKNWVERNSYSCSVVHEGLHNHHTTKSFSRTPGK

SEQ ID NO: 2185 - protein, 480 aa, synthetic construct
  source 1..480: note = XENP43407 Chain 2 - 38E2[B7H3]_H2_L1.1_Fab-1D7B4[NKG2D]_H1_L1_scFv(GKPGS)4-mIgG 2aa_F405L/R411T-Fc(216)_huIgG1_mIgG2aa_Hinge(KasI)_T370K/K4 09R
EVQLLESGGGLVQPGGSLRLSCAASGFTFSSYAMSWVRQAPGKGLEWVSSISASGGSTYYADSVKGRFTISRDNSKNTLYLQMNSLRAEDTAVYYCAKGIFSIYFFYFDYWGQGTLVTVSSGKPGSGKPGSGKPGSGKPGSDIQMTQSPSSLSASVGDRVTITCRASQSISSYLNWYQQKPGKAPKLLIYAASSLQSGVPSRFSGSGSGTDFTLTISSLQPEDFATYYCQQSYSTPYTFGQGTKLEIKEPKSSDKTHTCPPCPAPNLLGGPSVFIFPPKIKDVLMISLSPMVTCVVVDVSEDDPDVQISWFVNNVEVLTAQTQTHREDYNSTLRVVSALPIQHQDWMSGKEFKCKVNNKALPAPIERTISKPKGSVRAPQVYVLPPPEEEMTKKQVTLTCMVKDFMPEDIYVEWTNNGKTELNYKNTEPVLDSDGSYFMYSRLRVEKKNWVERNSYSCSVVHEGLHNHHTTKSFSRTPGK

SEQ ID NO: 2186 - protein, 217 aa, synthetic construct; identical to SEQ ID NO: 2183
  source 1..217: note = XENP43407 Chain 3 - 38E2[B7H3]_H2_L1.1_Fab-1D7B4[NKG2D]_H1_L1_scFv(GKPGS)4-mIgG 2aa_F405L/R411T-Fc(216)_huIgG1_mIgG2aa_Hinge(KasI)_T370K/K4 09R

SEQ ID NO: 2187 - protein, 447 aa, synthetic construct
  source 1..447: note = XENP43408 Chain 1 - 38E2[B7H3]_H2_L1.1_Fab-1D7B4[NKG2D]_H1_L1_scFv(GKPGS)4-mIgG 2aa_L234A/L235A/P329G/T370K/K409R-Fc(216)_huIgG1_mIgG2aa_Hi nge(KasI)_L234A/L235A/P329G/F405L/R411T
EVQLLESGGGLVQPGGSLRLSCAVSGFSLSSYGVIWVRQAPGKGLEYVSWVSSGGSTNYASSVKGRFTISRDTSKNTVYLQMNSLRAEDTAVYFCARGATNSGTDIWGPGTLVTVSSAKTTAPSVYPLAPVCGDTTGSSVTLGCLVKGYFPEPVTLTWNSGSLSSGVHTFPAVLQSDLYTLSSSVTVTSSTWPSQSITCNVAHPASSTKVDKKIEPRGPTIKPCPPCKCPAPNAAGGPSVFIFPPKIKDVLMISLSPMVTCVVVDVSEDDPDVQISWFVNNVEVLTAQTQTHREDYNSTLRVVSALPIQHQDWMSGKEFKCKVNNKALGAPIERTISKPKGSVRAPQVYVLPPPEEEMTKKQVTLTCMVKDFMPEDIYVEWTNNGKTELNYKNTEPVLDSDGSYFMYSRLRVEKKNWVERNSYSCSVVHEGLHNHHTTKSFSRTPGK

SEQ ID NO: 2188 - protein, 480 aa, synthetic construct
  source 1..480: note = XENP43408 Chain 2 - 38E2[B7H3]_H2_L1.1_Fab-1D7B4[NKG2D]_H1_L1_scFv(GKPGS)4-mIgG 2aa_L234A/L235A/P329G/T370K/K409R-Fc(216)_huIgG1_mIgG2aa_Hi nge(KasI)_L234A/L235A/P329G/F405L/R411T
EVQLLESGGGLVQPGGSLRLSCAASGFTFSSYAMSWVRQAPGKGLEWVSSISASGGSTYYADSVKGRFTISRDNSKNTLYLQMNSLRAEDTAVYYCAKGIFSIYFFYFDYWGQGTLVTVSSGKPGSGKPGSGKPGSGKPGSDIQMTQSPSSLSASVGDRVTITCRASQSISSYLNWYQQKPGKAPKLLIYAASSLQSGVPSRFSGSGSGTDFTLTISSLQPEDFATYYCQQSYSTPYTFGQGTKLEIKEPKSSDKTHTCPPCPAPNAAGGPSVFIFPPKIKDVLMISLSPMVTCVVVDVSEDDPDVQISWFVNNVEVLTAQTQTHREDYNSTLRVVSALPIQHQDWMSGKEFKCKVNNKALGAPIERTISKPKGSVRAPQVYVLPPPEEEMTKKQVTLTCMVTDFMPEDIYVEWTNNGKTELNYKNTEPVLDSDGSYLMYSKLTVEKKNWVERNSYSCSVVHEGLHNHHTTKSFSRTPGK

SEQ ID NO: 2189 - protein, 217 aa, synthetic construct; identical to SEQ ID NO: 2183
  source 1..217: note = XENP43408 Chain 3 - 38E2[B7H3]_H2_L1.1_Fab-1D7B4[NKG2D]_H1_L1_scFv(GKPGS)4-mIgG 2aa_L234A/L235A/P329G/T370K/K409R-Fc(216)_huIgG1_mIgG2aa_Hi nge(KasI)_L234A/L235A/P329G/F405L/R411T

SEQ ID NO: 2190 - protein, 447 aa, synthetic construct
  source 1..447: note = XENP43409 Chain 1 - 38E2[B7H3]_H2_L1.1_Fab-1D7B4[NKG2D]_H1_L1_scFv(GKPGS)4-mIgG 2aa_L234A/L235A/P329G/F405L/R411T-Fc(216)_huIgG1_mIgG2aa_Hi nge(KasI)_L234A/L235A/P329G/T370K/K409R
EVQLLESGGGLVQPGGSLRLSCAVSGFSLSSYGVIWVRQAPGKGLEYVSWVSSGGSTNYASSVKGRFTISRDTSKNTVYLQMNSLRAEDTAVYFCARGATNSGTDIWGPGTLVTVSSAKTTAPSVYPLAPVCGDTTGSSVTLGCLVKGYFPEPVTLTWNSGSLSSGVHTFPAVLQSDLYTLSSSVTVTSSTWPSQSITCNVAHPASSTKVDKKIEPRGPTIKPCPPCKCPAPNAAGGPSVFIFPPKIKDVLMISLSPMVTCVVVDVSEDDPDVQISWFVNNVEVLTAQTQTHREDYNSTLRVVSALPIQHQDWMSGKEFKCKVNNKALGAPIERTISKPKGSVRAPQVYVLPPPEEEMTKKQVTLTCMVTDFMPEDIYVEWTNNGKTELNYKNTEPVLDSDGSYLMYSKLTVEKKNWVERNSYSCSVVHEGLHNHHTTKSFSRTPGK

SEQ ID NO: 2191 - protein, 480 aa, synthetic construct
  source 1..480: note = XENP43409 Chain 2 - 38E2[B7H3]_H2_L1.1_Fab-1D7B4[NKG2D]_H1_L1_scFv(GKPGS)4-mIgG 2aa_L234A/L235A/P329G/F405L/R411T-Fc(216)_huIgG1_mIgG2aa_Hi nge(KasI)_L234A/L235A/P329G/T370K/K409R
EVQLLESGGGLVQPGGSLRLSCAASGFTFSSYAMSWVRQAPGKGLEWVSSISASGGSTYYADSVKGRFTISRDNSKNTLYLQMNSLRAEDTAVYYCAKGIFSIYFFYFDYWGQGTLVTVSSGKPGSGKPGSGKPGSGKPGSDIQMTQSPSSLSASVGDRVTITCRASQSISSYLNWYQQKPGKAPKLLIYAASSLQSGVPSRFSGSGSGTDFTLTISSLQPEDFATYYCQQSYSTPYTFGQGTKLEIKEPKSSDKTHTCPPCPAPNAAGGPSVFIFPPKIKDVLMISLSPMVTCVVVDVSEDDPDVQISWFVNNVEVLTAQTQTHREDYNSTLRVVSALPIQHQDWMSGKEFKCKVNNKALGAPIERTISKPKGSVRAPQVYVLPPPEEEMTKKQVTLTCMVKDFMPEDIYVEWTNNGKTELNYKNTEPVLDSDGSYFMYSRLRVEKKNWVERNSYSCSVVHEGLHNHHTTKSFSRTPGK

SEQ ID NO: 2192 - protein, 217 aa, synthetic construct; identical to SEQ ID NO: 2183
  source 1..217: note = XENP43409 Chain 3 - 38E2[B7H3]_H2_L1.1_Fab-1D7B4[NKG2D]_H1_L1_scFv(GKPGS)4-mIgG 2aa_L234A/L235A/P329G/F405L/R411T-Fc(216)_huIgG1_mIgG2aa_Hi nge(KasI)_L234A/L235A/P329G/T370K/K409R

SEQ ID NO: 2193 - protein, 448 aa, synthetic construct; identical to SEQ ID NO: 2106
  source 1..448: note = XENP43490 Chain 1 - 2E4A3.189[B7H3]_H1.22_L1_Fab-1D7B4[NKG2D]_H1.3_L1_scFv(GKPG S)4-IgG1_pI(-)_Isosteric_A_PVA_/S267K/L368D/K370S-Fc(216)_I gG1_C220S/PVA_/S267K/S364K/E357Q

SEQ ID NO: 2194 - protein, 479 aa, synthetic construct; identical to SEQ ID NO: 2164
  source 1..479: note = XENP43490 Chain 2 - 2E4A3.189[B7H3]_H1.22_L1_Fab-1D7B4[NKG2D]_H1.3_L1_scFv(GKPG S)4-IgG1_pI(-)_Isosteric_A_PVA_/S267K/L368D/K370S-Fc(216)_I gG1_C220S/PVA_/S267K/S364K/E357Q

SEQ ID NO: 2195 - protein, 214 aa, synthetic construct; identical to SEQ ID NO: 2108
  source 1..214: note = XENP43490 Chain 3 - 2E4A3.189[B7H3]_H1.22_L1_Fab-1D7B4[NKG2D]_H1.3_L1_scFv(GKPG S)4-IgG1_pI(-)_Isosteric_A_PVA_/S267K/L368D/K370S-Fc(216)_I gG1_C220S/PVA_/S267K/S364K/E357Q

SEQ ID NO: 2196 - protein, 448 aa, synthetic construct; identical to SEQ ID NO: 2106
  source 1..448: note = XENP43491 Chain 1 - 2E4A3.189[B7H3]_H1.22_L1_Fab-1D7B4[NKG2D]_H1.23_L1_scFv(GKP GS)4-IgG1_pI(-)_Isosteric_A_PVA_/S267K/L368D/K370S-Fc(216)_ IgG1_C220S/PVA_/S267K/S364K/E357Q

SEQ ID NO: 2197 - protein, 479 aa, synthetic construct; identical to SEQ ID NO: 2167
  source 1..479: note = XENP43491 Chain 2 - 2E4A3.189[B7H3]_H1.22_L1_Fab-1D7B4[NKG2D]_H1.23_L1_scFv(GKP GS)4-IgG1_pI(-)_Isosteric_A_PVA_/S267K/L368D/K370S-Fc(216)_ IgG1_C220S/PVA_/S267K/S364K/E357Q

SEQ ID NO: 2198 - protein, 214 aa, synthetic construct; identical to SEQ ID NO: 2108
  source 1..214: note = XENP43491 Chain 3 - 2E4A3.189[B7H3]_H1.22_L1_Fab-1D7B4[NKG2D]_H1.23_L1_scFv(GKP GS)4-IgG1_pI(-)_Isosteric_A_PVA_/S267K/L368D/K370S-Fc(216)_ IgG1_C220S/PVA_/S267K/S364K/E357Q

SEQ ID NO: 2199 - protein, 448 aa, synthetic construct; identical to SEQ ID NO: 2106
  source 1..448: note = XENP43492 Chain 1 - 2E4A3.189[B7H3]_H1.22_L1_Fab-1D7B4[NKG2D]_H1.28_L1_scFv(GKP GS)4-IgG1_pI(-)_Isosteric_A_PVA_/S267K/L368D/K370S-Fc(216)_ IgG1_C220S/PVA_/S267K/S364K/E357Q

SEQ ID NO: 2200 - protein, 479 aa, synthetic construct; identical to SEQ ID NO: 2170
  source 1..479: note = XENP43492 Chain 2 - 2E4A3.189[B7H3]_H1.22_L1_Fab-1D7B4[NKG2D]_H1.28_L1_scFv(GKP GS)4-IgG1_pI(-)_Isosteric_A_PVA_/S267K/L368D/K370S-Fc(216)_ IgG1_C220S/PVA_/S267K/S364K/E357Q

SEQ ID NO: 2201 - protein, 214 aa, synthetic construct; identical to SEQ ID NO: 2108
  source 1..214: note = XENP43492 Chain 3 - 2E4A3.189[B7H3]_H1.22_L1_Fab-1D7B4[NKG2D]_H1.28_L1_scFv(GKP GS)4-IgG1_pI(-)_Isosteric_A_PVA_/S267K/L368D/K370S-Fc(216)_ IgG1_C220S/PVA_/S267K/S364K/E357Q

SEQ ID NO: 2202 - protein, 448 aa, synthetic construct; identical to SEQ ID NO: 2106
  source 1..448: note = XENP43493 Chain 1 - 2E4A3.189[B7H3]_H1.22_L1_Fab-1D7B4[NKG2D]_H1.31_L1_scFv(GKP GS)4-IgG1_pI(-)_Isosteric_A_PVA_/S267K/L368D/K370S-Fc(216)_ IgG1_C220S/PVA_/S267K/S364K/E357Q

SEQ ID NO: 2203 - protein, 479 aa, synthetic construct; identical to SEQ ID NO: 2173
  source 1..479: note = XENP43493 Chain 2 - 2E4A3.189[B7H3]_H1.22_L1_Fab-1D7B4[NKG2D]_H1.31_L1_scFv(GKP GS)4-IgG1_pI(-)_Isosteric_A_PVA_/S267K/L368D/K370S-Fc(216)_ IgG1_C220S/PVA_/S267K/S364K/E357Q

SEQ ID NO: 2204 - protein, 214 aa, synthetic construct; identical to SEQ ID NO: 2108
  source 1..214: note = XENP43493 Chain 3 - 2E4A3.189[B7H3]_H1.22_L1_Fab-1D7B4[NKG2D]_H1.31_L1_scFv(GKP GS)4-IgG1_pI(-)_Isosteric_A_PVA_/S267K/L368D/K370S-Fc(216)_ IgG1_C220S/PVA_/S267K/S364K/E357Q

SEQ ID NO: 2205 - protein, 448 aa, synthetic construct; identical to SEQ ID NO: 2106
  source 1..448: note = XENP43494 Chain 1 - 2E4A3.189[B7H3]_H1.22_L1_Fab-1D7B4[NKG2D]_H1.33_L1_scFv(GKP GS)4-IgG1_pI(-)_Isosteric_A_PVA_/S267K/L368D/K370S-Fc(216)_ IgG1_C220S/PVA_/S267K/S364K/E357Q

SEQ ID NO: 2206 - protein, 479 aa, synthetic construct; identical to SEQ ID NO: 2176
  source 1..479: note = XENP43494 Chain 2 - 2E4A3.189[B7H3]_H1.22_L1_Fab-1D7B4[NKG2D]_H1.33_L1_scFv(GKP GS)4-IgG1_pI(-)_Isosteric_A_PVA_/S267K/L368D/K370S-Fc(216)_ IgG1_C220S/PVA_/S267K/S364K/E357Q

SEQ ID NO: 2207 - protein, 214 aa, synthetic construct; identical to SEQ ID NO: 2108
  source 1..214: note = XENP43494 Chain 3 - 2E4A3.189[B7H3]_H1.22_L1_Fab-1D7B4[NKG2D]_H1.33_L1_scFv(GKP GS)4-IgG1_pI(-)_Isosteric_A_PVA_/S267K/L368D/K370S-Fc(216)_ IgG1_C220S/PVA_/S267K/S364K/E357Q

SEQ ID NO: 2208 - protein, 448 aa, synthetic construct; identical to SEQ ID NO: 2106
  source 1..448: note = XENP43495 Chain 1 - 2E4A3.189[B7H3]_H1.22_L1_Fab-1D7B4[NKG2D]_H1.42_L1_scFv(GKP GS)4-IgG1_pI(-)_Isosteric_A_PVA_/S267K/L368D/K370S-Fc(216)_ IgG1_C220S/PVA_/S267K/S364K/E357Q

SEQ ID NO: 2209 - protein, 479 aa, synthetic construct; identical to SEQ ID NO: 2179
  source 1..479: note = XENP43495 Chain 2 - 2E4A3.189[B7H3]_H1.22_L1_Fab-1D7B4[NKG2D]_H1.42_L1_scFv(GKP GS)4-IgG1_pI(-)_Isosteric_A_PVA_/S267K/L368D/K370S-Fc(216)_ IgG1_C220S/PVA_/S267K/S364K/E357Q

SEQ ID NO: 2210 - protein, 214 aa, synthetic construct; identical to SEQ ID NO: 2108
  source 1..214: note = XENP43495 Chain 3 - 2E4A3.189[B7H3]_H1.22_L1_Fab-1D7B4[NKG2D]_H1.42_L1_scFv(GKP GS)4-IgG1_pI(-)_Isosteric_A_PVA_/S267K/L368D/K370S-Fc(216)_ IgG1_C220S/PVA_/S267K/S364K/E357Q

SEQ ID NO: 2211 - protein, 449 aa, synthetic construct; identical to SEQ ID NO: 2109
  source 1..449: note = XENP43496 Chain 1 - 2E4A3.189[B7H3]_H1.22_L1_Fab-1D7B4[NKG2D]_H1.3_L1_scFv(GKPG S)4-IgG1_pI(-)_Isosteric_A_L368D/K370S-Fc(216)_IgG1_C220S/S 364K/E357Q

SEQ ID NO: 2212 - protein, 480 aa, synthetic construct; identical to SEQ ID NO: 1308
  source 1..480: note = XENP43496 Chain 2 - 2E4A3.189[B7H3]_H1.22_L1_Fab-1D7B4[NKG2D]_H1.3_L1_scFv(GKPG S)4-IgG1_pI(-)_Isosteric_A_L368D/K370S-Fc(216)_IgG1_C220S/S 364K/E357Q

SEQ ID NO: 2213 - protein, 214 aa, synthetic construct; identical to SEQ ID NO: 2108
  source 1..214: note = XENP43496 Chain 3 - 2E4A3.189[B7H3]_H1.22_L1_Fab-1D7B4[NKG2D]_H1.3_L1_scFv(GKPG S)4-IgG1_pI(-)_Isosteric_A_L368D/K370S-Fc(216)_IgG1_C220S/S 364K/E357Q

SEQ ID NO: 2214 - protein, 449 aa, synthetic construct; identical to SEQ ID NO: 2109
  source 1..449: note = XENP43497 Chain 1 - 2E4A3.189[B7H3]_H1.22_L1_Fab-1D7B4[NKG2D]_H1.23_L1_scFv(GKP GS)4-IgG1_pI(-)_Isosteric_A_L368D/K370S-Fc(216)_IgG1_C220S/ S364K/E357Q

SEQ ID NO: 2215 - protein, 480 aa, synthetic construct; identical to SEQ ID NO: 1310
  source 1..480: note = XENP43497 Chain 2 - 2E4A3.189[B7H3]_H1.22_L1_Fab-1D7B4[NKG2D]_H1.23_L1_scFv(GKP GS)4-IgG1_pI(-)_Isosteric_A_L368D/K370S-Fc(216)_IgG1_C220S/ S364K/E357Q

SEQ ID NO: 2216 - protein, 214 aa, synthetic construct; identical to SEQ ID NO: 2108
  source 1..214: note = XENP43497 Chain 3 - 2E4A3.189[B7H3]_H1.22_L1_Fab-1D7B4[NKG2D]_H1.23_L1_scFv(GKP GS)4-IgG1_pI(-)_Isosteric_A_L368D/K370S-Fc(216)_IgG1_C220S/ S364K/E357Q

SEQ ID NO: 2217 - protein, 449 aa, synthetic construct; identical to SEQ ID NO: 2109
  source 1..449: note = XENP43498 Chain 1 - 2E4A3.189[B7H3]_H1.22_L1_Fab-1D7B4[NKG2D]_H1.28_L1_scFv(GKP GS)4-IgG1_pI(-)_Isosteric_A_L368D/K370S-Fc(216)_IgG1_C220S/ S364K/E357Q

SEQ ID NO: 2218 - protein, 480 aa, synthetic construct; identical to SEQ ID NO: 1312
  source 1..480: note = XENP43498 Chain 2 - 2E4A3.189[B7H3]_H1.22_L1_Fab-1D7B4[NKG2D]_H1.28_L1_scFv(GKP GS)4-IgG1_pI(-)_Isosteric_A_L368D/K370S-Fc(216)_IgG1_C220S/ S364K/E357Q

SEQ ID NO: 2219 - protein, 214 aa, synthetic construct; identical to SEQ ID NO: 2108
  source 1..214: note = XENP43498 Chain 3 - 2E4A3.189[B7H3]_H1.22_L1_Fab-1D7B4[NKG2D]_H1.28_L1_scFv(GKP GS)4-IgG1_pI(-)_Isosteric_A_L368D/K370S-Fc(216)_IgG1_C220S/ S364K/E357Q

SEQ ID NO: 2220 - protein, 449 aa, synthetic construct; identical to SEQ ID NO: 2109
  source 1..449: note = XENP43499 Chain 1 - 2E4A3.189[B7H3]_H1.22_L1_Fab-1D7B4[NKG2D]_H1.31_L1_scFv(GKP GS)4-IgG1_pI(-)_Isosteric_A_L368D/K370S-Fc(216)_IgG1_C220S/ S364K/E357Q

SEQ ID NO: 2221 - protein, 480 aa, synthetic construct; identical to SEQ ID NO: 1204
  source 1..480: note = XENP43499 Chain 2 - 2E4A3.189[B7H3]_H1.22_L1_Fab-1D7B4[NKG2D]_H1.31_L1_scFv(GKP GS)4-IgG1_pI(-)_Isosteric_A_L368D/K370S-Fc(216)_IgG1_C220S/ S364K/E357Q

SEQ ID NO: 2222 - protein, 214 aa, synthetic construct; identical to SEQ ID NO: 2108
  source 1..214: note = XENP43499 Chain 3 - 2E4A3.189[B7H3]_H1.22_L1_Fab-1D7B4[NKG2D]_H1.31_L1_scFv(GKP GS)4-IgG1_pI(-)_Isosteric_A_L368D/K370S-Fc(216)_IgG1_C220S/ S364K/E357Q

SEQ ID NO: 2223 - protein, 449 aa, synthetic construct; identical to SEQ ID NO: 2109
  source 1..449: note = XENP43500 Chain 1 - 2E4A3.189[B7H3]_H1.22_L1_Fab-1D7B4[NKG2D]_H1.33_L1_scFv(GKP GS)4-IgG1_pI(-)_Isosteric_A_L368D/K370S-Fc(216)_IgG1_C220S/ S364K/E357Q

SEQ ID NO: 2224 - protein, 480 aa, synthetic construct; identical to SEQ ID NO: 1316
  source 1..480: note = XENP43500 Chain 2 - 2E4A3.189[B7H3]_H1.22_L1_Fab-1D7B4[NKG2D]_H1.33_L1_scFv(GKP GS)4-IgG1_pI(-)_Isosteric_A_L368D/K370S-Fc(216)_IgG1_C220S/ S364K/E357Q

SEQ ID NO: 2225 - protein, 214 aa, synthetic construct; identical to SEQ ID NO: 2108
  source 1..214: note = XENP43500 Chain 3 - 2E4A3.189[B7H3]_H1.22_L1_Fab-1D7B4[NKG2D]_H1.33_L1_scFv(GKP GS)4-IgG1_pI(-)_Isosteric_A_L368D/K370S-Fc(216)_IgG1_C220S/ S364K/E357Q

SEQ ID NO: 2226 - protein, 449 aa, synthetic construct; identical to SEQ ID NO: 2109
  source 1..449: note = XENP43501 Chain 1 - 2E4A3.189[B7H3]_H1.22_L1_Fab-1D7B4[NKG2D]_H1.42_L1_scFv(GKP GS)4-IgG1_pI(-)_Isosteric_A_L368D/K370S-Fc(216)_IgG1_C220S/ S364K/E357Q

SEQ ID NO: 2227 - protein, 480 aa, synthetic construct; identical to SEQ ID NO: 2026
  source 1..480: note = XENP43501 Chain 2 - 2E4A3.189[B7H3]_H1.22_L1_Fab-1D7B4[NKG2D]_H1.42_L1_scFv(GKP GS)4-IgG1_pI(-)_Isosteric_A_L368D/K370S-Fc(216)_IgG1_C220S/ S364K/E357Q

SEQ ID NO: 2228 - protein, 214 aa, synthetic construct; identical to SEQ ID NO: 2108
  source 1..214: note = XENP43501 Chain 3 - 2E4A3.189[B7H3]_H1.22_L1_Fab-1D7B4[NKG2D]_H1.42_L1_scFv(GKP GS)4-IgG1_pI(-)_Isosteric_A_L368D/K370S-Fc(216)_IgG1_C220S/ S364K/E357Q

SEQ ID NO: 2229 - protein, 449 aa, synthetic construct; identical to SEQ ID NO: 2112
  source 1..449: note = XENP43502 Chain 1 - 2E4A3.189[B7H3]_H1.22_L1_Fab-1D7B4[NKG2D]_H1.3_L1_scFv(GKPG S)4-IgG1_pI(-)_Isosteric_A_S239D/I332E/L368D/K370S-Fc(216)_ IgG1_C220S/S239D/I332E/S364K/E357Q

SEQ ID NO: 2230 - protein, 480 aa, synthetic construct; identical to SEQ ID NO: 1191
  source 1..480: note = XENP43502 Chain 2 - 2E4A3.189[B7H3]_H1.22_L1_Fab-1D7B4[NKG2D]_H1.3_L1_scFv(GKPG S)4-IgG1_pI(-)_Isosteric_A_S239D/I332E/L368D/K370S-Fc(216)_ IgG1_C220S/S239D/I332E/S364K/E357Q

SEQ ID NO: 2231 - protein, 214 aa, synthetic construct; identical to SEQ ID NO: 2108
  source 1..214: note = XENP43502 Chain 3 - 2E4A3.189[B7H3]_H1.22_L1_Fab-1D7B4[NKG2D]_H1.3_L1_scFv(GKPG S)4-IgG1_pI(-)_Isosteric_A_S239D/I332E/L368D/K370S-Fc(216)_ IgG1_C220S/S239D/I332E/S364K/E357Q

SEQ ID NO: 2232 - protein, 449 aa, synthetic construct; identical to SEQ ID NO: 2112
  source 1..449: note = XENP43503 Chain 1 - 2E4A3.189[B7H3]_H1.22_L1_Fab-1D7B4[NKG2D]_H1.23_L1_scFv(GKP GS)4-IgG1_pI(-)_Isosteric_A_S239D/I332E/L368D/K370S-Fc(216) _IgG1_C220S/S239D/I332E/S364K/E357Q

SEQ ID NO: 2233 - protein, 480 aa, synthetic construct; identical to SEQ ID NO: 1193
  source 1..480: note = XENP43503 Chain 2 - 2E4A3.189[B7H3]_H1.22_L1_Fab-1D7B4[NKG2D]_H1.23_L1_scFv(GKP GS)4-IgG1_pI(-)_Isosteric_A_S239D/I332E/L368D/K370S-Fc(216) _IgG1_C220S/S239D/I332E/S364K/E357Q

SEQ ID NO: 2234 - protein, 214 aa, synthetic construct; identical to SEQ ID NO: 2108
  source 1..214: note = XENP43503 Chain 3 - 2E4A3.189[B7H3]_H1.22_L1_Fab-1D7B4[NKG2D]_H1.23_L1_scFv(GKP GS)4-IgG1_pI(-)_Isosteric_A_S239D/I332E/L368D/K370S-Fc(216) _IgG1_C220S/S239D/I332E/S364K/E357Q

SEQ ID NO: 2235 - protein, 449 aa, synthetic construct; identical to SEQ ID NO: 2112
  source 1..449: note = XENP43504 Chain 1 - 2E4A3.189[B7H3]_H1.22_L1_Fab-1D7B4[NKG2D]_H1.28_L1_scFv(GKP GS)4-IgG1_pI(-)_Isosteric_A_S239D/I332E/L368D/K370S-Fc(216) _IgG1_C220S/S239D/I332E/S364K/E357Q

SEQ ID NO: 2236 - protein, 480 aa, synthetic construct; identical to SEQ ID NO: 1195
  source 1..480: note = XENP43504 Chain 2 - 2E4A3.189[B7H3]_H1.22_L1_Fab-1D7B4[NKG2D]_H1.28_L1_scFv(GKP GS)4-IgG1_pI(-)_Isosteric_A_S239D/I332E/L368D/K370S-Fc(216) _IgG1_C220S/S239D/I332E/S364K/E357Q

SEQ ID NO: 2237 - protein, 214 aa, synthetic construct; identical to SEQ ID NO: 2108
  source 1..214: note = XENP43504 Chain 3 - 2E4A3.189[B7H3]_H1.22_L1_Fab-1D7B4[NKG2D]_H1.28_L1_scFv(GKP GS)4-IgG1_pI(-)_Isosteric_A_S239D/I332E/L368D/K370S-Fc(216) _IgG1_C220S/S239D/I332E/S364K/E357Q

SEQ ID NO: 2238 - protein, 449 aa, synthetic construct; identical to SEQ ID NO: 2112
  source 1..449: note = XENP43505 Chain 1 - 2E4A3.189[B7H3]_H1.22_L1_Fab-1D7B4[NKG2D]_H1.31_L1_scFv(GKP GS)4-IgG1_pI(-)_Isosteric_A_S239D/I332E/L368D/K370S-Fc(216) _IgG1_C220S/S239D/I332E/S364K/E357Q

SEQ ID NO: 2239 - protein, 480 aa, synthetic construct; identical to SEQ ID NO: 1197
  source 1..480: note = XENP43505 Chain 2 - 2E4A3.189[B7H3]_H1.22_L1_Fab-1D7B4[NKG2D]_H1.31_L1_scFv(GKP GS)4-IgG1_pI(-)_Isosteric_A_S239D/I332E/L368D/K370S-Fc(216) _IgG1_C220S/S239D/I332E/S364K/E357Q

SEQ ID NO: 2240 - protein, 214 aa, synthetic construct; identical to SEQ ID NO: 2108
  source 1..214: note = XENP43505 Chain 3 - 2E4A3.189[B7H3]_H1.22_L1_Fab-1D7B4[NKG2D]_H1.31_L1_scFv(GKP GS)4-IgG1_pI(-)_Isosteric_A_S239D/I332E/L368D/K370S-Fc(216) _IgG1_C220S/S239D/I332E/S364K/E357Q

SEQ ID NO: 2241 - protein, 449 aa, synthetic construct; identical to SEQ ID NO: 2112
  source 1..449: note = XENP43506 Chain 1 - 2E4A3.189[B7H3]_H1.22_L1_Fab-1D7B4[NKG2D]_H1.33_L1_scFv(GKP GS)4-IgG1_pI(-)_Isosteric_A_S239D/I332E/L368D/K370S-Fc(216) _IgG1_C220S/S239D/I332E/S364K/E357Q

SEQ ID NO: 2242 - protein, 480 aa, synthetic construct; identical to SEQ ID NO: 1199
  source 1..480: note = XENP43506 Chain 2 - 2E4A3.189[B7H3]_H1.22_L1_Fab-1D7B4[NKG2D]_H1.33_L1_scFv(GKP GS)4-IgG1_pI(-)_Isosteric_A_S239D/I332E/L368D/K370S-Fc(216) _IgG1_C220S/S239D/I332E/S364K/E357Q

SEQ ID NO: 2243 - protein, 214 aa, synthetic construct; identical to SEQ ID NO: 2108
  source 1..214: note = XENP43506 Chain 3 - 2E4A3.189[B7H3]_H1.22_L1_Fab-1D7B4[NKG2D]_H1.33_L1_scFv(GKP GS)4-IgG1_pI(-)_Isosteric_A_S239D/I332E/L368D/K370S-Fc(216) _IgG1_C220S/S239D/I332E/S364K/E357Q

SEQ ID NO: 2244 - protein, 449 aa, synthetic construct; identical to SEQ ID NO: 2112
  source 1..449: note = XENP43507 Chain 1 - 2E4A3.189[B7H3]_H1.22_L1_Fab-1D7B4[NKG2D]_H1.42_L1_scFv(GKP GS)4-IgG1_pI(-)_Isosteric_A_S239D/I332E/L368D/K370S-Fc(216) _IgG1_C220S/S239D/I332E/S364K/E357Q

SEQ ID NO: 2245 - protein, 480 aa, synthetic construct; identical to SEQ ID NO: 2029
  source 1..480: note = XENP43507 Chain 2 - 2E4A3.189[B7H3]_H1.22_L1_Fab-1D7B4[NKG2D]_H1.42_L1_scFv(GKP GS)4-IgG1_pI(-)_Isosteric_A_S239D/I332E/L368D/K370S-Fc(216) _IgG1_C220S/S239D/I332E/S364K/E357Q

SEQ ID NO: 2246 - protein, 214 aa, synthetic construct; identical to SEQ ID NO: 2108
  source 1..214: note = XENP43507 Chain 3 - 2E4A3.189[B7H3]_H1.22_L1_Fab-1D7B4[NKG2D]_H1.42_L1_scFv(GKP GS)4-IgG1_pI(-)_Isosteric_A_S239D/I332E/L368D/K370S-Fc(216) _IgG1_C220S/S239D/I332E/S364K/E357Q

SEQ ID NO: 2247 - protein, 447 aa, synthetic construct; identical to SEQ ID NO: 2181
  source 1..447: note = XENP43611 Chain 1 - 38E2[B7H3]_H2_L1.1_Fab-1D7B4[NKG2D]_H1_L1_scFv(GKPGS)4-mIgG 2aa_T370K/K409R-mIgG2aa_Hinge(KasI)_F405L/R411T

SEQ ID NO: 2248 - protein, 481 aa, synthetic construct
  source 1..481: note = XENP43611 Chain 2 - 38E2[B7H3]_H2_L1.1_Fab-1D7B4[NKG2D]_H1_L1_scFv(GKPGS)4-mIgG 2aa_T370K/K409R-mIgG2aa_Hinge(KasI)_F405L/R411T
EVQLLESGGGLVQPGGSLRLSCAASGFTFSSYAMSWVRQAPGKGLEWVSSISASGGSTYYADSVKGRFTISRDNSKNTLYLQMNSLRAEDTAVYYCAKGIFSIYFFYFDYWGQGTLVTVSSGKPGSGKPGSGKPGSGKPGSDIQMTQSPSSLSASVGDRVTITCRASQSISSYLNWYQQKPGKAPKLLIYAASSLQSGVPSRFSGSGSGTDFTLTISSLQPEDFATYYCQQSYSTPYTFGQGTKLEIKEPRGPTIKPCPPCKCPAPNLLGGPSVFIFPPKIKDVLMISLSPMVTCVVVDVSEDDPDVQISWFVNNVEVLTAQTQTHREDYNSTLRVVSALPIQHQDWMSGKEFKCKVNNKALPAPIERTISKPKGSVRAPQVYVLPPPEEEMTKKQVTLTCMVTDFMPEDIYVEWTNNGKTELNYKNTEPVLDSDGSYLMYSKLTVEKKNWVERNSYSCSVVHEGLHNHHTTKSFSRTPGK

SEQ ID NO: 2249 - protein, 217 aa, synthetic construct; identical to SEQ ID NO: 2183
  source 1..217: note = XENP43611 Chain 3 - 38E2[B7H3]_H2_L1.1_Fab-1D7B4[NKG2D]_H1_L1_scFv(GKPGS)4-mIgG 2aa_T370K/K409R-mIgG2aa_Hinge(KasI)_F405L/R411T

SEQ ID NO: 2250 - protein, 447 aa, synthetic construct; identical to SEQ ID NO: 2184
  source 1..447: note = XENP43612 Chain 1 - 38E2[B7H3]_H2_L1.1_Fab-1D7B4[NKG2D]_H1_L1_scFv(GKPGS)4-mIgG 2aa_F405L/R411T-mIgG2aa_Hinge(KasI)_T370K/K409R

SEQ ID NO: 2251 - protein, 481 aa, synthetic construct
  source 1..481: note = XENP43612 Chain 2 - 38E2[B7H3]_H2_L1.1_Fab-1D7B4[NKG2D]_H1_L1_scFv(GKPGS)4-mIgG 2aa_F405L/R411T-mIgG2aa_Hinge(KasI)_T370K/K409R
EVQLLESGGGLVQPGGSLRLSCAASGFTFSSYAMSWVRQAPGKGLEWVSSISASGGSTYYADSVKGRFTISRDNSKNTLYLQMNSLRAEDTAVYYCAKGIFSIYFFYFDYWGQGTLVTVSSGKPGSGKPGSGKPGSGKPGSDIQMTQSPSSLSASVGDRVTITCRASQSISSYLNWYQQKPGKAPKLLIYAASSLQSGVPSRFSGSGSGTDFTLTISSLQPEDFATYYCQQSYSTPYTFGQGTKLEIKEPRGPTIKPCPPCKCPAPNLLGGPSVFIFPPKIKDVLMISLSPMVTCVVVDVSEDDPDVQISWFVNNVEVLTAQTQTHREDYNSTLRVVSALPIQHQDWMSGKEFKCKVNNKALPAPIERTISKPKGSVRAPQVYVLPPPEEEMTKKQVTLTCMVKDFMPEDIYVEWTNNGKTELNYKNTEPVLDSDGSYFMYSRLRVEKKNWVERNSYSCSVVHEGLHNHHTTKSFSRTPGK

SEQ ID NO: 2252 - protein, 217 aa, synthetic construct; identical to SEQ ID NO: 2183
  source 1..217: note = XENP43612 Chain 3 - 38E2[B7H3]_H2_L1.1_Fab-1D7B4[NKG2D]_H1_L1_scFv(GKPGS)4-mIgG 2aa_F405L/R411T-mIgG2aa_Hinge(KasI)_T370K/K409R

SEQ ID NO: 2253 - protein, 447 aa, synthetic construct; identical to SEQ ID NO: 2187
  source 1..447: note = XENP43613 Chain 1 - 38E2[B7H3]_H2_L1.1_Fab-1D7B4[NKG2D]_H1_L1_scFv(GKPGS)4-mIgG 2aa_L234A/L235A/P329G/T370K/K409R-mIgG2aa_Hinge(KasI)_L234A /L235A/P329G/F405L/R411T

SEQ ID NO: 2254 - protein, 481 aa, synthetic construct
  source 1..481: note = XENP43613 Chain 2 - 38E2[B7H3]_H2_L1.1_Fab-1D7B4[NKG2D]_H1_L1_scFv(GKPGS)4-mIgG 2aa_L234A/L235A/P329G/T370K/K409R-mIgG2aa_Hinge(KasI)_L234A /L235A/P329G/F405L/R411T
EVQLLESGGGLVQPGGSLRLSCAASGFTFSSYAMSWVRQAPGKGLEWVSSISASGGSTYYADSVKGRFTISRDNSKNTLYLQMNSLRAEDTAVYYCAKGIFSIYFFYFDYWGQGTLVTVSSGKPGSGKPGSGKPGSGKPGSDIQMTQSPSSLSASVGDRVTITCRASQSISSYLNWYQQKPGKAPKLLIYAASSLQSGVPSRFSGSGSGTDFTLTISSLQPEDFATYYCQQSYSTPYTFGQGTKLEIKEPRGPTIKPCPPCKCPAPNAAGGPSVFIFPPKIKDVLMISLSPMVTCVVVDVSEDDPDVQISWFVNNVEVLTAQTQTHREDYNSTLRVVSALPIQHQDWMSGKEFKCKVNNKALGAPIERTISKPKGSVRAPQVYVLPPPEEEMTKKQVTLTCMVTDFMPEDIYVEWTNNGKTELNYKNTEPVLDSDGSYLMYSKLTVEKKNWVERNSYSCSVVHEGLHNHHTTKSFSRTPGK

SEQ ID NO: 2255 - protein, 217 aa, synthetic construct; identical to SEQ ID NO: 2183
  source 1..217: note = XENP43613 Chain 3 - 38E2[B7H3]_H2_L1.1_Fab-1D7B4[NKG2D]_H1_L1_scFv(GKPGS)4-mIgG 2aa_L234A/L235A/P329G/T370K/K409R-mIgG2aa_Hinge(KasI)_L234A /L235A/P329G/F405L/R411T

SEQ ID NO: 2256 - protein, 447 aa, synthetic construct; identical to SEQ ID NO: 2190
  source 1..447: note = XENP43614 Chain 1 - 38E2[B7H3]_H2_L1.1_Fab-1D7B4[NKG2D]_H1_L1_scFv(GKPGS)4-mIgG 2aa_L234A/L235A/P329G/F405L/R411T-mIgG2aa_Hinge(KasI)_L234A /L235A/P329G/T370K/K409R

SEQ ID NO: 2257 - protein, 481 aa, synthetic construct
  source 1..481: note = XENP43614 Chain 2 - 38E2[B7H3]_H2_L1.1_Fab-1D7B4[NKG2D]_H1_L1_scFv(GKPGS)4-mIgG 2aa_L234A/L235A/P329G/F405L/R411T-mIgG2aa_Hinge(KasI)_L234A /L235A/P329G/T370K/K409R
EVQLLESGGGLVQPGGSLRLSCAASGFTFSSYAMSWVRQAPGKGLEWVSSISASGGSTYYADSVKGRFTISRDNSKNTLYLQMNSLRAEDTAVYYCAKGIFSIYFFYFDYWGQGTLVTVSSGKPGSGKPGSGKPGSGKPGSDIQMTQSPSSLSASVGDRVTITCRASQSISSYLNWYQQKPGKAPKLLIYAASSLQSGVPSRFSGSGSGTDFTLTISSLQPEDFATYYCQQSYSTPYTFGQGTKLEIKEPRGPTIKPCPPCKCPAPNAAGGPSVFIFPPKIKDVLMISLSPMVTCVVVDVSEDDPDVQISWFVNNVEVLTAQTQTHREDYNSTLRVVSALPIQHQDWMSGKEFKCKVNNKALGAPIERTISKPKGSVRAPQVYVLPPPEEEMTKKQVTLTCMVKDFMPEDIYVEWTNNGKTELNYKNTEPVLDSDGSYFMYSRLRVEKKNWVERNSYSCSVVHEGLHNHHTTKSFSRTPGK

SEQ ID NO: 2258 - protein, 217 aa, synthetic construct; identical to SEQ ID NO: 2183
  source 1..217: note = XENP43614 Chain 3 - 38E2[B7H3]_H2_L1.1_Fab-1D7B4[NKG2D]_H1_L1_scFv(GKPGS)4-mIgG 2aa_L234A/L235A/P329G/F405L/R411T-mIgG2aa_Hinge(KasI)_L234A /L235A/P329G/T370K/K409R

SEQ ID NO: 2259 - protein, 447 aa, synthetic construct; identical to SEQ ID NO: 992
  source 1..447: note = XENP43619 Chain 1 - 38E2[B7H3]_H2_L1.1_Fab-1D7B4[NKG2D]_H1.3_L1_scFv(GKPGS)4-Ig G1_pI(-)_Isosteric_A_S239D/L368D/K370S-Fc(216)_IgG1_C220S/S 239D/S364K/E357Q

SEQ ID NO: 2260 - protein, 480 aa, synthetic construct
  source 1..480: note = XENP43619 Chain 2 - 38E2[B7H3]_H2_L1.1_Fab-1D7B4[NKG2D]_H1.3_L1_scFv(GKPGS)4-Ig G1_pI(-)_Isosteric_A_S239D/L368D/K370S-Fc(216)_IgG1_C220S/S 239D/S364K/E357Q
EVQLLESGGGLVQPGGSLRLSCAASGFTFSSSAMSWVRQAPGKGLEWVSSISASGGSTYYADSVKGRFTISRDNSKNTLYLQMNSLRAEDTAVYYCAKGIFSIYFFYFDYWGQGTLVTVSSGKPGSGKPGSGKPGSGKPGSDIQMTQSPSSLSASVGDRVTITCRASQSISSYLNWYQQKPGKAPKLLIYAASSLQSGVPSRFSGSGSGTDFTLTISSLQPEDFATYYCQQSYSTPYTFGQGTKLEIKEPKSSDKTHTCPPCPAPELLGGPDVFLFPPKPKDTLMISRTPEVTCVVVDVSHEDPEVKFNWYVDGVEVHNAKTKPREEQYNSTYRVVSVLTVLHQDWLNGKEYKCKVSNKALPAPIEKTISKAKGQPREPQVYTLPPSREQMTKNQVKLTCLVKGFYPSDIAVEWESNGQPENNYKTTPPVLDSDGSFFLYSKLTVDKSRWQQGNVFSCSVMHEALHNHYTQKSLSLSPGK

SEQ ID NO: 2261 - protein, 217 aa, synthetic construct; identical to SEQ ID NO: 6
  source 1..217: note = XENP43619 Chain 3 - 38E2[B7H3]_H2_L1.1_Fab-1D7B4[NKG2D]_H1.3_L1_scFv(GKPGS)4-Ig G1_pI(-)_Isosteric_A_S239D/L368D/K370S-Fc(216)_IgG1_C220S/S 239D/S364K/E357Q

SEQ ID NO: 2262 - protein, 447 aa, synthetic construct; identical to SEQ ID NO: 992
  source 1..447: note = XENP43620 Chain 1 - 38E2[B7H3]_H2_L1.1_Fab-1D7B4[NKG2D]_H1.23_L1_scFv(GKPGS)4-I gG1_pI(-)_Isosteric_A_S239D/L368D/K370S-Fc(216)_IgG1_C220S/ S239D/S364K/E357Q

SEQ ID NO: 2263 - protein, 480 aa, synthetic construct
  source 1..480: note = XENP43620 Chain 2 - 38E2[B7H3]_H2_L1.1_Fab-1D7B4[NKG2D]_H1.23_L1_scFv(GKPGS)4-I gG1_pI(-)_Isosteric_A_S239D/L368D/K370S-Fc(216)_IgG1_C220S/ S239D/S364K/E357Q
EVQLLESGGGLVQPGGSLRLSCAASGFTFSSYAMSWVRQAPGKGLEWVSSISASGGSTYYADSVKGRFTISRDNSKNTLYLQMNSLRAEDTAVYYCAKGIFAIYFFYFDYWGQGTLVTVSSGKPGSGKPGSGKPGSGKPGSDIQMTQSPSSLSASVGDRVTITCRASQSISSYLNWYQQKPGKAPKLLIYAASSLQSGVPSRFSGSGSGTDFTLTISSLQPEDFATYYCQQSYSTPYTFGQGTKLEIKEPKSSDKTHTCPPCPAPELLGGPDVFLFPPKPKDTLMISRTPEVTCVVVDVSHEDPEVKFNWYVDGVEVHNAKTKPREEQYNSTYRVVSVLTVLHQDWLNGKEYKCKVSNKALPAPIEKTISKAKGQPREPQVYTLPPSREQMTKNQVKLTCLVKGFYPSDIAVEWESNGQPENNYKTTPPVLDSDGSFFLYSKLTVDKSRWQQGNVFSCSVMHEALHNHYTQKSLSLSPGK

SEQ ID NO: 2264 - protein, 217 aa, synthetic construct; identical to SEQ ID NO: 6
  source 1..217: note = XENP43620 Chain 3 - 38E2[B7H3]_H2_L1.1_Fab-1D7B4[NKG2D]_H1.23_L1_scFv(GKPGS)4-I gG1_pI(-)_Isosteric_A_S239D/L368D/K370S-Fc(216)_IgG1_C220S/ S239D/S364K/E357Q

SEQ ID NO: 2265 - protein, 447 aa, synthetic construct; identical to SEQ ID NO: 992
  source 1..447: note = XENP43621 Chain 1 - 38E2[B7H3]_H2_L1.1_Fab-1D7B4[NKG2D]_H1.28_L1_scFv(GKPGS)4-I gG1_pI(-)_Isosteric_A_S239D/L368D/K370S-Fc(216)_IgG1_C220S/ S239D/S364K/E357Q

SEQ ID NO: 2266 - protein, 480 aa, synthetic construct
  source 1..480: note = XENP43621 Chain 2 - 38E2[B7H3]_H2_L1.1_Fab-1D7B4[NKG2D]_H1.28_L1_scFv(GKPGS)4-I gG1_pI(-)_Isosteric_A_S239D/L368D/K370S-Fc(216)_IgG1_C220S/ S239D/S364K/E357Q
EVQLLESGGGLVQPGGSLRLSCAASGFTFSSYAMSWVRQAPGKGLEWVSSISASGGSTYYADSVKGRFTISRDNSKNTLYLQMNSLRAEDTAVYYCAKGIFSHYFFYFDYWGQGTLVTVSSGKPGSGKPGSGKPGSGKPGSDIQMTQSPSSLSASVGDRVTITCRASQSISSYLNWYQQKPGKAPKLLIYAASSLQSGVPSRFSGSGSGTDFTLTISSLQPEDFATYYCQQSYSTPYTFGQGTKLEIKEPKSSDKTHTCPPCPAPELLGGPDVFLFPPKPKDTLMISRTPEVTCVVVDVSHEDPEVKFNWYVDGVEVHNAKTKPREEQYNSTYRVVSVLTVLHQDWLNGKEYKCKVSNKALPAPIEKTISKAKGQPREPQVYTLPPSREQMTKNQVKLTCLVKGFYPSDIAVEWESNGQPENNYKTTPPVLDSDGSFFLYSKLTVDKSRWQQGNVFSCSVMHEALHNHYTQKSLSLSPGK

SEQ ID NO: 2267 - protein, 217 aa, synthetic construct; identical to SEQ ID NO: 6
  source 1..217: note = XENP43621 Chain 3 - 38E2[B7H3]_H2_L1.1_Fab-1D7B4[NKG2D]_H1.28_L1_scFv(GKPGS)4-I gG1_pI(-)_Isosteric_A_S239D/L368D/K370S-Fc(216)_IgG1_C220S/ S239D/S364K/E357Q

SEQ ID NO: 2268 - protein, 447 aa, synthetic construct; identical to SEQ ID NO: 992
  source 1..447: note = XENP43622 Chain 1 - 38E2[B7H3]_H2_L1.1_Fab-1D7B4[NKG2D]_H1.31_L1_scFv(GKPGS)4-I gG1_pI(-)_Isosteric_A_S239D/L368D/K370S-Fc(216)_IgG1_C220S/ S239D/S364K/E357Q

SEQ ID NO: 2269 - protein, 480 aa, synthetic construct
  source 1..480: note = XENP43622 Chain 2 - 38E2[B7H3]_H2_L1.1_Fab-1D7B4[NKG2D]_H1.31_L1_scFv(GKPGS)4-I gG1_pI(-)_Isosteric_A_S239D/L368D/K370S-Fc(216)_IgG1_C220S/ S239D/S364K/E357Q
EVQLLESGGGLVQPGGSLRLSCAASGFTFSSYAMSWVRQAPGKGLEWVSSISASGGSTYYADSVKGRFTISRDNSKNTLYLQMNSLRAEDTAVYYCAKGIFSIAFFYFDYWGQGTLVTVSSGKPGSGKPGSGKPGSGKPGSDIQMTQSPSSLSASVGDRVTITCRASQSISSYLNWYQQKPGKAPKLLIYAASSLQSGVPSRFSGSGSGTDFTLTISSLQPEDFATYYCQQSYSTPYTFGQGTKLEIKEPKSSDKTHTCPPCPAPELLGGPDVFLFPPKPKDTLMISRTPEVTCVVVDVSHEDPEVKFNWYVDGVEVHNAKTKPREEQYNSTYRVVSVLTVLHQDWLNGKEYKCKVSNKALPAPIEKTISKAKGQPREPQVYTLPPSREQMTKNQVKLTCLVKGFYPSDIAVEWESNGQPENNYKTTPPVLDSDGSFFLYSKLTVDKSRWQQGNVFSCSVMHEALHNHYTQKSLSLSPGK

SEQ ID NO: 2270 - protein, 217 aa, synthetic construct; identical to SEQ ID NO: 6
  source 1..217: note = XENP43622 Chain 3 - 38E2[B7H3]_H2_L1.1_Fab-1D7B4[NKG2D]_H1.31_L1_scFv(GKPGS)4-I gG1_pI(-)_Isosteric_A_S239D/L368D/K370S-Fc(216)_IgG1_C220S/ S239D/S364K/E357Q

SEQ ID NO: 2271 - protein, 447 aa, synthetic construct; identical to SEQ ID NO: 992
  source 1..447: note = XENP43623 Chain 1 - 38E2[B7H3]_H2_L1.1_Fab-1D7B4[NKG2D]_H1.33_L1_scFv(GKPGS)4-I gG1_pI(-)_Isosteric_A_S239D/L368D/K370S-Fc(216)_IgG1_C220S/ S239D/S364K/E357Q

SEQ ID NO: 2272 - protein, 480 aa, synthetic construct
  source 1..480: note = XENP43623 Chain 2 - 38E2[B7H3]_H2_L1.1_Fab-1D7B4[NKG2D]_H1.33_L1_scFv(GKPGS)4-I gG1_pI(-)_Isosteric_A_S239D/L368D/K370S-Fc(216)_IgG1_C220S/ S239D/S364K/E357Q
EVQLLESGGGLVQPGGSLRLSCAASGFTFSSYAMSWVRQAPGKGLEWVSSISASGGSTYYADSVKGRFTISRDNSKNTLYLQMNSLRAEDTAVYYCAKGIFSIEFFYFDYWGQGTLVTVSSGKPGSGKPGSGKPGSGKPGSDIQMTQSPSSLSASVGDRVTITCRASQSISSYLNWYQQKPGKAPKLLIYAASSLQSGVPSRFSGSGSGTDFTLTISSLQPEDFATYYCQQSYSTPYTFGQGTKLEIKEPKSSDKTHTCPPCPAPELLGGPDVFLFPPKPKDTLMISRTPEVTCVVVDVSHEDPEVKFNWYVDGVEVHNAKTKPREEQYNSTYRVVSVLTVLHQDWLNGKEYKCKVSNKALPAPIEKTISKAKGQPREPQVYTLPPSREQMTKNQVKLTCLVKGFYPSDIAVEWESNGQPENNYKTTPPVLDSDGSFFLYSKLTVDKSRWQQGNVFSCSVMHEALHNHYTQKSLSLSPGK

SEQ ID NO: 2273 - protein, 217 aa, synthetic construct; identical to SEQ ID NO: 6
  source 1..217: note = XENP43623 Chain 3 - 38E2[B7H3]_H2_L1.1_Fab-1D7B4[NKG2D]_H1.33_L1_scFv(GKPGS)4-I gG1_pI(-)_Isosteric_A_S239D/L368D/K370S-Fc(216)_IgG1_C220S/ S239D/S364K/E357Q

SEQ ID NO: 2274 - protein, 447 aa, synthetic construct; identical to SEQ ID NO: 992
  source 1..447: note = XENP43624 Chain 1 - 38E2[B7H3]_H2_L1.1_Fab-1D7B4[NKG2D]_H1.42_L1_scFv(GKPGS)4-I gG1_pI(-)_Isosteric_A_S239D/L368D/K370S-Fc(216)_IgG1_C220S/ S239D/S364K/E357Q

SEQ ID NO: 2275 - protein, 480 aa, synthetic construct
  source 1..480: note = XENP43624 Chain 2 - 38E2[B7H3]_H2_L1.1_Fab-1D7B4[NKG2D]_H1.42_L1_scFv(GKPGS)4-I gG1_pI(-)_Isosteric_A_S239D/L368D/K370S-Fc(216)_IgG1_C220S/ S239D/S364K/E357Q
EVQLLESGGGLVQPGGSLRLSCAASGFTFSSYAMSWVRQAPGKGLEWVSSISASGGSTYYADSVKGRFTISRDNSKNTLYLQMNSLRAEDTAVYYCAKGIFSIYFHYFDYWGQGTLVTVSSGKPGSGKPGSGKPGSGKPGSDIQMTQSPSSLSASVGDRVTITCRASQSISSYLNWYQQKPGKAPKLLIYAASSLQSGVPSRFSGSGSGTDFTLTISSLQPEDFATYYCQQSYSTPYTFGQGTKLEIKEPKSSDKTHTCPPCPAPELLGGPDVFLFPPKPKDTLMISRTPEVTCVVVDVSHEDPEVKFNWYVDGVEVHNAKTKPREEQYNSTYRVVSVLTVLHQDWLNGKEYKCKVSNKALPAPIEKTISKAKGQPREPQVYTLPPSREQMTKNQVKLTCLVKGFYPSDIAVEWESNGQPENNYKTTPPVLDSDGSFFLYSKLTVDKSRWQQGNVFSCSVMHEALHNHYTQKSLSLSPGK

SEQ ID NO: 2276 - protein, 217 aa, synthetic construct; identical to SEQ ID NO: 6
  source 1..217: note = XENP43624 Chain 3 - 38E2[B7H3]_H2_L1.1_Fab-1D7B4[NKG2D]_H1.42_L1_scFv(GKPGS)4-I gG1_pI(-)_Isosteric_A_S239D/L368D/K370S-Fc(216)_IgG1_C220S/ S239D/S364K/E357Q

SEQ ID NO: 2277 - protein, 447 aa, synthetic construct; identical to SEQ ID NO: 994
  source 1..447: note = XENP43625 Chain 1 - 38E2[B7H3]_H2_L1.1_Fab-1D7B4[NKG2D]_H1.3_L1_scFv(GKPGS)4-Ig G1_pI(-)_Isosteric_A_I332E/L368D/K370S-Fc(216)_IgG1_C220S/S 239D/S364K/E357Q

SEQ ID NO: 2278 - protein, 480 aa, synthetic construct; identical to SEQ ID NO: 2260
  source 1..480: note = XENP43625 Chain 2 - 38E2[B7H3]_H2_L1.1_Fab-1D7B4[NKG2D]_H1.3_L1_scFv(GKPGS)4-Ig G1_pI(-)_Isosteric_A_I332E/L368D/K370S-Fc(216)_IgG1_C220S/S 239D/S364K/E357Q

SEQ ID NO: 2279 - protein, 217 aa, synthetic construct; identical to SEQ ID NO: 6
  source 1..217: note = XENP43625 Chain 3 - 38E2[B7H3]_H2_L1.1_Fab-1D7B4[NKG2D]_H1.3_L1_scFv(GKPGS)4-Ig G1_pI(-)_Isosteric_A_I332E/L368D/K370S-Fc(216)_IgG1_C220S/S 239D/S364K/E357Q

SEQ ID NO: 2280 - protein, 447 aa, synthetic construct; identical to SEQ ID NO: 994
  source 1..447: note = XENP43626 Chain 1 - 38E2[B7H3]_H2_L1.1_Fab-1D7B4[NKG2D]_H1.23_L1_scFv(GKPGS)4-I gG1_pI(-)_Isosteric_A_I332E/L368D/K370S-Fc(216)_IgG1_C220S/ S239D/S364K/E357Q

SEQ ID NO: 2281 - protein, 480 aa, synthetic construct; identical to SEQ ID NO: 2263
  source 1..480: note = XENP43626 Chain 2 - 38E2[B7H3]_H2_L1.1_Fab-1D7B4[NKG2D]_H1.23_L1_scFv(GKPGS)4-I gG1_pI(-)_Isosteric_A_I332E/L368D/K370S-Fc(216)_IgG1_C220S/ S239D/S364K/E357Q

SEQ ID NO: 2282 - protein, 217 aa, synthetic construct; identical to SEQ ID NO: 6
  source 1..217: note = XENP43626 Chain 3 - 38E2[B7H3]_H2_L1.1_Fab-1D7B4[NKG2D]_H1.23_L1_scFv(GKPGS)4-I gG1_pI(-)_Isosteric_A_I332E/L368D/K370S-Fc(216)_IgG1_C220S/ S239D/S364K/E357Q

SEQ ID NO: 2283 - protein, 447 aa, synthetic construct; identical to SEQ ID NO: 994
  source 1..447: note = XENP43627 Chain 1 - 38E2[B7H3]_H2_L1.1_Fab-1D7B4[NKG2D]_H1.28_L1_scFv(GKPGS)4-I gG1_pI(-)_Isosteric_A_I332E/L368D/K370S-Fc(216)_IgG1_C220S/ S239D/S364K/E357Q

SEQ ID NO: 2284 - protein, 480 aa, synthetic construct; identical to SEQ ID NO: 2266
  source 1..480: note = XENP43627 Chain 2 - 38E2[B7H3]_H2_L1.1_Fab-1D7B4[NKG2D]_H1.28_L1_scFv(GKPGS)4-I gG1_pI(-)_Isosteric_A_I332E/L368D/K370S-Fc(216)_IgG1_C220S/ S239D/S364K/E357Q

SEQ ID NO: 2285 - protein, 217 aa, synthetic construct; identical to SEQ ID NO: 6
  source 1..217: note = XENP43627 Chain 3 - 38E2[B7H3]_H2_L1.1_Fab-1D7B4[NKG2D]_H1.28_L1_scFv(GKPGS)4-I gG1_pI(-)_Isosteric_A_I332E/L368D/K370S-Fc(216)_IgG1_C220S/ S239D/S364K/E357Q

SEQ ID NO: 2286 - protein, 447 aa, synthetic construct; identical to SEQ ID NO: 994
  source 1..447: note = XENP43628 Chain 1 - 38E2[B7H3]_H2_L1.1_Fab-1D7B4[NKG2D]_H1.31_L1_scFv(GKPGS)4-I gG1_pI(-)_Isosteric_A_I332E/L368D/K370S-Fc(216)_IgG1_C220S/ S239D/S364K/E357Q

SEQ ID NO: 2287 - protein, 480 aa, synthetic construct; identical to SEQ ID NO: 2269
  source 1..480: note = XENP43628 Chain 2 - 38E2[B7H3]_H2_L1.1_Fab-1D7B4[NKG2D]_H1.31_L1_scFv(GKPGS)4-I gG1_pI(-)_Isosteric_A_I332E/L368D/K370S-Fc(216)_IgG1_C220S/ S239D/S364K/E357Q

SEQ ID NO: 2288 - protein, 217 aa, synthetic construct; identical to SEQ ID NO: 6
  source 1..217: note = XENP43628 Chain 3 - 38E2[B7H3]_H2_L1.1_Fab-1D7B4[NKG2D]_H1.31_L1_scFv(GKPGS)4-I gG1_pI(-)_Isosteric_A_I332E/L368D/K370S-Fc(216)_IgG1_C220S/ S239D/S364K/E357Q

SEQ ID NO: 2289 - protein, 447 aa, synthetic construct; identical to SEQ ID NO: 994
  source 1..447: note = XENP43629 Chain 1 - 38E2[B7H3]_H2_L1.1_Fab-1D7B4[NKG2D]_H1.33_L1_scFv(GKPGS)4-I gG1_pI(-)_Isosteric_A_I332E/L368D/K370S-Fc(216)_IgG1_C220S/ S239D/S364K/E357Q

SEQ ID NO: 2290 - protein, 480 aa, synthetic construct; identical to SEQ ID NO: 2272
  source 1..480: note = XENP43629 Chain 2 - 38E2[B7H3]_H2_L1.1_Fab-1D7B4[NKG2D]_H1.33_L1_scFv(GKPGS)4-I gG1_pI(-)_Isosteric_A_I332E/L368D/K370S-Fc(216)_IgG1_C220S/ S239D/S364K/E357Q

SEQ ID NO: 2291 - protein, 217 aa, synthetic construct; identical to SEQ ID NO: 6
  source 1..217: note = XENP43629 Chain 3 - 38E2[B7H3]_H2_L1.1_Fab-1D7B4[NKG2D]_H1.33_L1_scFv(GKPGS)4-I gG1_pI(-)_Isosteric_A_I332E/L368D/K370S-Fc(216)_IgG1_C220S/ S239D/S364K/E357Q

SEQ ID NO: 2292 - protein, 447 aa, synthetic construct; identical to SEQ ID NO: 994
  source 1..447: note = XENP43630 Chain 1 - 38E2[B7H3]_H2_L1.1_Fab-1D7B4[NKG2D]_H1.42_L1_scFv(GKPGS)4-I gG1_pI(-)_Isosteric_A_I332E/L368D/K370S-Fc(216)_IgG1_C220S/ S239D/S364K/E357Q

SEQ ID NO: 2293 - protein, 480 aa, synthetic construct; identical to SEQ ID NO: 2275
  source 1..480: note = XENP43630 Chain 2 - 38E2[B7H3]_H2_L1.1_Fab-1D7B4[NKG2D]_H1.42_L1_scFv(GKPGS)4-I gG1_pI(-)_Isosteric_A_I332E/L368D/K370S-Fc(216)_IgG1_C220S/ S239D/S364K/E357Q

SEQ ID NO: 2294 - protein, 217 aa, synthetic construct; identical to SEQ ID NO: 6
  source 1..217: note = XENP43630 Chain 3 - 38E2[B7H3]_H2_L1.1_Fab-1D7B4[NKG2D]_H1.42_L1_scFv(GKPGS)4-I gG1_pI(-)_Isosteric_A_I332E/L368D/K370S-Fc(216)_IgG1_C220S/ S239D/S364K/E357Q

SEQ ID NO: 2295 - protein, 449 aa, synthetic construct
  source 1..449: note = XENP43664 Chain 1 - 2E4A3.189[B7H3]_H1.22_L1_Fab-1D7B4[NKG2D]_H1.3_L1_scFv(GKPG S)4-IgG1_pI(-)_Isosteric_A_S239D/L368D/K370S-Fc(216)_IgG1_C 220S/S239D/S364K/E357Q
QVQLVQSGAEVKKPGASVKVSCKASGYIFTNNYMHWVRQAPGQGLEWMGIISPSVGRTAYAQKFQGRVTMTRDTSTSTVYMELSSLRSEDTAVYYCARGGGSSPRLDYWGQGTLVTVSSASTKGPSVFPLAPSSKSTSGGTAALGCLVKDYFPEPVTVSWNSGALTSGVHTFPAVLQSSGLYSLSSVVTVPSSSLGTQTYICNVNHKPSDTKVDKKVEPKSCDKTHTCPPCPAPELLGGPDVFLFPPKPKDTLMISRTPEVTCVVVDVSHEDPEVKFNWYVDGVEVHNAKTKPREEEYNSTYRVVSVLTVLHQDWLNGKEYKCKVSNKALPAPIEKTISKAKGQPREPQVYTLPPSREEMTKNQVSLTCDVSGFYPSDIAVEWESDGQPENNYKTTPPVLDSDGSFFLYSKLTVDKSRWEQGDVFSCSVMHEALHNHYTQKSLSLSPGK

SEQ ID NO: 2296 - protein, 480 aa, synthetic construct; identical to SEQ ID NO: 2260
  source 1..480: note = XENP43664 Chain 2 - 2E4A3.189[B7H3]_H1.22_L1_Fab-1D7B4[NKG2D]_H1.3_L1_scFv(GKPG S)4-IgG1_pI(-)_Isosteric_A_S239D/L368D/K370S-Fc(216)_IgG1_C 220S/S239D/S364K/E357Q

SEQ ID NO: 2297 - protein, 214 aa, synthetic construct; identical to SEQ ID NO: 2108
  source 1..214: note = XENP43664 Chain 3 - 2E4A3.189[B7H3]_H1.22_L1_Fab-1D7B4[NKG2D]_H1.3_L1_scFv(GKPG S)4-IgG1_pI(-)_Isosteric_A_S239D/L368D/K370S-Fc(216)_IgG1_C 220S/S239D/S364K/E357Q

SEQ ID NO: 2298 - protein, 449 aa, synthetic construct; identical to SEQ ID NO: 2295
  source 1..449: note = XENP43665 Chain 1 - 2E4A3.189[B7H3]_H1.22_L1_Fab-1D7B4[NKG2D]_H1.23_L1_scFv(GKP GS)4-IgG1_pI(-)_Isosteric_A_S239D/L368D/K370S-Fc(216)_IgG1_ C220S/S239D/S364K/E357Q

SEQ ID NO: 2299 - protein, 480 aa, synthetic construct; identical to SEQ ID NO: 2263
  source 1..480: note = XENP43665 Chain 2 - 2E4A3.189[B7H3]_H1.22_L1_Fab-1D7B4[NKG2D]_H1.23_L1_scFv(GKP GS)4-IgG1_pI(-)_Isosteric_A_S239D/L368D/K370S-Fc(216)_IgG1_ C220S/S239D/S364K/E357Q

SEQ ID NO: 2300 - protein, 214 aa, synthetic construct; identical to SEQ ID NO: 2108
  source 1..214: note = XENP43665 Chain 3 - 2E4A3.189[B7H3]_H1.22_L1_Fab-1D7B4[NKG2D]_H1.23_L1_scFv(GKP GS)4-IgG1_pI(-)_Isosteric_A_S239D/L368D/K370S-Fc(216)_IgG1_ C220S/S239D/S364K/E357Q

SEQ ID NO: 2301 - protein, 449 aa, synthetic construct; identical to SEQ ID NO: 2295
  source 1..449: note = XENP43666 Chain 1 - 2E4A3.189[B7H3]_H1.22_L1_Fab-1D7B4[NKG2D]_H1.28_L1_scFv(GKP GS)4-IgG1_pI(-)_Isosteric_A_S239D/L368D/K370S-Fc(216)_IgG1_ C220S/S239D/S364K/E357Q

SEQ ID NO: 2302 - protein, 480 aa, synthetic construct; identical to SEQ ID NO: 2266
  source 1..480: note = XENP43666 Chain 2 - 2E4A3.189[B7H3]_H1.22_L1_Fab-1D7B4[NKG2D]_H1.28_L1_scFv(GKP GS)4-IgG1_pI(-)_Isosteric_A_S239D/L368D/K370S-Fc(216)_IgG1_ C220S/S239D/S364K/E357Q

SEQ ID NO: 2303 - protein, 214 aa, synthetic construct; identical to SEQ ID NO: 2108
  source 1..214: note = XENP43666 Chain 3 - 2E4A3.189[B7H3]_H1.22_L1_Fab-1D7B4[NKG2D]_H1.28_L1_scFv(GKP GS)4-IgG1_pI(-)_Isosteric_A_S239D/L368D/K370S-Fc(216)_IgG1_ C220S/S239D/S364K/E357Q

SEQ ID NO: 2304 - protein, 449 aa, synthetic construct; identical to SEQ ID NO: 2295
  source 1..449: note = XENP43667 Chain 1 - 2E4A3.189[B7H3]_H1.22_L1_Fab-1D7B4[NKG2D]_H1.31_L1_scFv(GKP GS)4-IgG1_pI(-)_Isosteric_A_S239D/L368D/K370S-Fc(216)_IgG1_ C220S/S239D/S364K/E357Q

SEQ ID NO: 2305 - protein, 480 aa, synthetic construct; identical to SEQ ID NO: 2269
  source 1..480: note = XENP43667 Chain 2 - 2E4A3.189[B7H3]_H1.22_L1_Fab-1D7B4[NKG2D]_H1.31_L1_scFv(GKP GS)4-IgG1_pI(-)_Isosteric_A_S239D/L368D/K370S-Fc(216)_IgG1_ C220S/S239D/S364K/E357Q

SEQ ID NO: 2306 - protein, 214 aa, synthetic construct; identical to SEQ ID NO: 2108
  source 1..214: note = XENP43667 Chain 3 - 2E4A3.189[B7H3]_H1.22_L1_Fab-1D7B4[NKG2D]_H1.31_L1_scFv(GKP GS)4-IgG1_pI(-)_Isosteric_A_S239D/L368D/K370S-Fc(216)_IgG1_ C220S/S239D/S364K/E357Q

SEQ ID NO: 2307 - protein, 449 aa, synthetic construct; identical to SEQ ID NO: 2295
  source 1..449: note = XENP43668 Chain 1 - 2E4A3.189[B7H3]_H1.22_L1_Fab-1D7B4[NKG2D]_H1.33_L1_scFv(GKP GS)4-IgG1_pI(-)_Isosteric_A_S239D/L368D/K370S-Fc(216)_IgG1_ C220S/S239D/S364K/E357Q

SEQ ID NO: 2308 - protein, 480 aa, synthetic construct; identical to SEQ ID NO: 2272
  source 1..480: note = XENP43668 Chain 2 - 2E4A3.189[B7H3]_H1.22_L1_Fab-1D7B4[NKG2D]_H1.33_L1_scFv(GKP GS)4-IgG1_pI(-)_Isosteric_A_S239D/L368D/K370S-Fc(216)_IgG1_ C220S/S239D/S364K/E357Q

SEQ ID NO: 2309 - protein, 214 aa, synthetic construct; identical to SEQ ID NO: 2108
  source 1..214: note = XENP43668 Chain 3 - 2E4A3.189[B7H3]_H1.22_L1_Fab-1D7B4[NKG2D]_H1.33_L1_scFv(GKP GS)4-IgG1_pI(-)_Isosteric_A_S239D/L368D/K370S-Fc(216)_IgG1_ C220S/S239D/S364K/E357Q

SEQ ID NO: 2310 - protein, 449 aa, synthetic construct; identical to SEQ ID NO: 2295
  source 1..449: note = XENP43669 Chain 1 - 2E4A3.189[B7H3]_H1.22_L1_Fab-1D7B4[NKG2D]_H1.42_L1_scFv(GKP GS)4-IgG1_pI(-)_Isosteric_A_S239D/L368D/K370S-Fc(216)_IgG1_ C220S/S239D/S364K/E357Q

SEQ ID NO: 2311 - protein, 480 aa, synthetic construct; identical to SEQ ID NO: 2275
  source 1..480: note = XENP43669 Chain 2 - 2E4A3.189[B7H3]_H1.22_L1_Fab-1D7B4[NKG2D]_H1.42_L1_scFv(GKP GS)4-IgG1_pI(-)_Isosteric_A_S239D/L368D/K370S-Fc(216)_IgG1_ C220S/S239D/S364K/E357Q

SEQ ID NO: 2312 - protein, 214 aa, synthetic construct; identical to SEQ ID NO: 2108
  source 1..214: note = XENP43669 Chain 3 - 2E4A3.189[B7H3]_H1.22_L1_Fab-1D7B4[NKG2D]_H1.42_L1_scFv(GKP GS)4-IgG1_pI(-)_Isosteric_A_S239D/L368D/K370S-Fc(216)_IgG1_ C220S/S239D/S364K/E357Q

SEQ ID NO: 2313 - protein, 449 aa, synthetic construct
  source 1..449: note = XENP43670 Chain 1 - 2E4A3.189[B7H3]_H1.22_L1_Fab-1D7B4[NKG2D]_H1.3_L1_scFv(GKPG S)4-IgG1_pI(-)_Isosteric_A_I332E/L368D/K370S-Fc(216)_IgG1_C 220S/S239D/S364K/E357Q
QVQLVQSGAEVKKPGASVKVSCKASGYIFTNNYMHWVRQAPGQGLEWMGIISPSVGRTAYAQKFQGRVTMTRDTSTSTVYMELSSLRSEDTAVYYCARGGGSSPRLDYWGQGTLVTVSSASTKGPSVFPLAPSSKSTSGGTAALGCLVKDYFPEPVTVSWNSGALTSGVHTFPAVLQSSGLYSLSSVVTVPSSSLGTQTYICNVNHKPSDTKVDKKVEPKSCDKTHTCPPCPAPELLGGPSVFLFPPKPKDTLMISRTPEVTCVVVDVSHEDPEVKFNWYVDGVEVHNAKTKPREEEYNSTYRVVSVLTVLHQDWLNGKEYKCKVSNKALPAPEEKTISKAKGQPREPQVYTLPPSREEMTKNQVSLTCDVSGFYPSDIAVEWESDGQPENNYKTTPPVLDSDGSFFLYSKLTVDKSRWEQGDVFSCSVMHEALHNHYTQKSLSLSPGK

SEQ ID NO: 2314 - protein, 480 aa, synthetic construct; identical to SEQ ID NO: 2260
  source 1..480: note = XENP43670 Chain 2 - 2E4A3.189[B7H3]_H1.22_L1_Fab-1D7B4[NKG2D]_H1.3_L1_scFv(GKPG S)4-IgG1_pI(-)_Isosteric_A_I332E/L368D/K370S-Fc(216)_IgG1_C 220S/S239D/S364K/E357Q

SEQ ID NO: 2315 - protein, 214 aa, synthetic construct; identical to SEQ ID NO: 2108
  source 1..214: note = XENP43670 Chain 3 - 2E4A3.189[B7H3]_H1.22_L1_Fab-1D7B4[NKG2D]_H1.3_L1_scFv(GKPG S)4-IgG1_pI(-)_Isosteric_A_I332E/L368D/K370S-Fc(216)_IgG1_C 220S/S239D/S364K/E357Q

SEQ ID NO: 2316 - protein, 449 aa, synthetic construct; identical to SEQ ID NO: 2313
  source 1..449: note = XENP43671 Chain 1 - 2E4A3.189[B7H3]_H1.22_L1_Fab-1D7B4[NKG2D]_H1.23_L1_scFv(GKP GS)4-IgG1_pI(-)_Isosteric_A_I332E/L368D/K370S-Fc(216)_IgG1_ C220S/S239D/S364K/E357Q

SEQ ID NO: 2317 - protein, 480 aa, synthetic construct; identical to SEQ ID NO: 2263
  source 1..480: note = XENP43671 Chain 2 - 2E4A3.189[B7H3]_H1.22_L1_Fab-1D7B4[NKG2D]_H1.23_L1_scFv(GKP GS)4-IgG1_pI(-)_Isosteric_A_I332E/L368D/K370S-Fc(216)_IgG1_ C220S/S239D/S364K/E357Q

SEQ ID NO: 2318 - protein, 214 aa, synthetic construct; identical to SEQ ID NO: 2108
  source 1..214: note = XENP43671 Chain 3 - 2E4A3.189[B7H3]_H1.22_L1_Fab-1D7B4[NKG2D]_H1.23_L1_scFv(GKP GS)4-IgG1_pI(-)_Isosteric_A_I332E/L368D/K370S-Fc(216)_IgG1_ C220S/S239D/S364K/E357Q

SEQ ID NO: 2319 - protein, 449 aa, synthetic construct; identical to SEQ ID NO: 2313
  source 1..449: note = XENP43672 Chain 1 - 2E4A3.189[B7H3]_H1.22_L1_Fab-1D7B4[NKG2D]_H1.28_L1_scFv(GKP GS)4-IgG1_pI(-)_Isosteric_A_I332E/L368D/K370S-Fc(216)_IgG1_ C220S/S239D/S364K/E357Q

SEQ ID NO: 2320 - protein, 480 aa, synthetic construct; identical to SEQ ID NO: 2266
  source 1..480: note = XENP43672 Chain 2 - 2E4A3.189[B7H3]_H1.22_L1_Fab-1D7B4[NKG2D]_H1.28_L1_scFv(GKP GS)4-IgG1_pI(-)_Isosteric_A_I332E/L368D/K370S-Fc(216)_IgG1_ C220S/S239D/S364K/E357Q

SEQ ID NO: 2321 - protein, 214 aa, synthetic construct; identical to SEQ ID NO: 2108
  source 1..214: note = XENP43672 Chain 3 - 2E4A3.189[B7H3]_H1.22_L1_Fab-1D7B4[NKG2D]_H1.28_L1_scFv(GKP GS)4-IgG1_pI(-)_Isosteric_A_I332E/L368D/K370S-Fc(216)_IgG1_ C220S/S239D/S364K/E357Q

SEQ ID NO: 2322 - protein, 449 aa, synthetic construct; identical to SEQ ID NO: 2313
  source 1..449: note = XENP43673 Chain 1 - 2E4A3.189[B7H3]_H1.22_L1_Fab-1D7B4[NKG2D]_H1.31_L1_scFv(GKP GS)4-IgG1_pI(-)_Isosteric_A_I332E/L368D/K370S-Fc(216)_IgG1_ C220S/S239D/S364K/E357Q

SEQ ID NO: 2323 - protein, 480 aa, synthetic construct; identical to SEQ ID NO: 2269
  source 1..480: note = XENP43673 Chain 2 - 2E4A3.189[B7H3]_H1.22_L1_Fab-1D7B4[NKG2D]_H1.31_L1_scFv(GKP GS)4-IgG1_pI(-)_Isosteric_A_I332E/L368D/K370S-Fc(216)_IgG1_ C220S/S239D/S364K/E357Q

SEQ ID NO: 2324 - protein, 214 aa, synthetic construct; identical to SEQ ID NO: 2108
  source 1..214: note = XENP43673 Chain 3 - 2E4A3.189[B7H3]_H1.22_L1_Fab-1D7B4[NKG2D]_H1.31_L1_scFv(GKP GS)4-IgG1_pI(-)_Isosteric_A_I332E/L368D/K370S-Fc(216)_IgG1_ C220S/S239D/S364K/E357Q

SEQ ID NO: 2325 - protein, 449 aa, synthetic construct; identical to SEQ ID NO: 2313
  source 1..449: note = XENP43674 Chain 1 - 2E4A3.189[B7H3]_H1.22_L1_Fab-1D7B4[NKG2D]_H1.33_L1_scFv(GKP GS)4-IgG1_pI(-)_Isosteric_A_I332E/L368D/K370S-Fc(216)_IgG1_ C220S/S239D/S364K/E357Q

SEQ ID NO: 2326 - protein, 480 aa, synthetic construct; identical to SEQ ID NO: 2272
  source 1..480: note = XENP43674 Chain 2 - 2E4A3.189[B7H3]_H1.22_L1_Fab-1D7B4[NKG2D]_H1.33_L1_scFv(GKP GS)4-IgG1_pI(-)_Isosteric_A_I332E/L368D/K370S-Fc(216)_IgG1_ C220S/S239D/S364K/E357Q

SEQ ID NO: 2327 - protein, 214 aa, synthetic construct; identical to SEQ ID NO: 2108
  source 1..214: note = XENP43674 Chain 3 - 2E4A3.189[B7H3]_H1.22_L1_Fab-1D7B4[NKG2D]_H1.33_L1_scFv(GKP GS)4-IgG1_pI(-)_Isosteric_A_I332E/L368D/K370S-Fc(216)_IgG1_ C220S/S239D/S364K/E357Q

SEQ ID NO: 2328 - protein, 449 aa, synthetic construct; identical to SEQ ID NO: 2313
  source 1..449: note = XENP43675 Chain 1 - 2E4A3.189[B7H3]_H1.22_L1_Fab-1D7B4[NKG2D]_H1.42_L1_scFv(GKP GS)4-IgG1_pI(-)_Isosteric_A_I332E/L368D/K370S-Fc(216)_IgG1_ C220S/S239D/S364K/E357Q

SEQ ID NO: 2329 - protein, 480 aa, synthetic construct; identical to SEQ ID NO: 2275
  source 1..480: note = XENP43675 Chain 2 - 2E4A3.189[B7H3]_H1.22_L1_Fab-1D7B4[NKG2D]_H1.42_L1_scFv(GKP GS)4-IgG1_pI(-)_Isosteric_A_I332E/L368D/K370S-Fc(216)_IgG1_ C220S/S239D/S364K/E357Q

SEQ ID NO: 2330 - protein, 214 aa, synthetic construct; identical to SEQ ID NO: 2108
  source 1..214: note = XENP43675 Chain 3 - 2E4A3.189[B7H3]_H1.22_L1_Fab-1D7B4[NKG2D]_H1.42_L1_scFv(GKP GS)4-IgG1_pI(-)_Isosteric_A_I332E/L368D/K370S-Fc(216)_IgG1_ C220S/S239D/S364K/E357Q

SEQ ID NO: 2331 - protein, 450 aa, synthetic construct
  source 1..450: note = XENP43714 Chain 1 - 6A1[B7H3]_H1L1_Fab-1D7B4[NKG2D]_H1L1_scFv(GKPGS)4-IgG1_pI(- )_Isosteric_A_PVA_/S267K/L368D/K370S-Fc(216)_IgG1_C220S/PVA _/S267K/S364K/E357Q
EVQLLESGGGLVQPGGSLRLSCAASGFTFSNYYMAWVRQAPGKGLEWVSSISTGGGSTYYRDSVKGRFTISRDNSKSTLYLQMNSLRAEDTAVYYCTTDLSAIAATPFAYWGQGTLVTVSSASTKGPSVFPLAPSSKSTSGGTAALGCLVKDYFPEPVTVSWNSGALTSGVHTFPAVLQSSGLYSLSSVVTVPSSSLGTQTYICNVNHKPSDTKVDKKVEPKSCDKTHTCPPCPAPPVAGPSVFLFPPKPKDTLMISRTPEVTCVVVDVKHEDPEVKFNWYVDGVEVHNAKTKPREEEYNSTYRVVSVLTVLHQDWLNGKEYKCKVSNKALPAPIEKTISKAKGQPREPQVYTLPPSREEMTKNQVSLTCDVSGFYPSDIAVEWESDGQPENNYKTTPPVLDSDGSFFLYSKLTVDKSRWEQGDVFSCSVMHEALHNHYTQKSLSLSPGK

SEQ ID NO: 2332 - protein, 479 aa, synthetic construct; identical to SEQ ID NO: 1039
  source 1..479: note = XENP43714 Chain 2 - 6A1[B7H3]_H1L1_Fab-1D7B4[NKG2D]_H1L1_scFv(GKPGS)4-IgG1_pI(- )_Isosteric_A_PVA_/S267K/L368D/K370S-Fc(216)_IgG1_C220S/PVA _/S267K/S364K/E357Q

SEQ ID NO: 2333 - protein, 213 aa, synthetic construct; identical to SEQ ID NO: 150
  source 1..213: note = XENP43714 Chain 3 - 6A1[B7H3]_H1L1_Fab-1D7B4[NKG2D]_H1L1_scFv(GKPGS)4-IgG1_pI(- )_Isosteric_A_PVA_/S267K/L368D/K370S-Fc(216)_IgG1_C220S/PVA _/S267K/S364K/E357Q

SEQ ID NO: 2334 - protein, 451 aa, synthetic construct
  source 1..451: note = XENP43716 Chain 1 - 6A1[B7H3]_H1L1_Fab-1D7B4[NKG2D]_H1L1_scFv(GKPGS)4-IgG1_pI(- )_Isosteric_A_S239D/L368D/K370S-Fc(216)_IgG1_C220S/S239D/S3 64K/E357Q
EVQLLESGGGLVQPGGSLRLSCAASGFTFSNYYMAWVRQAPGKGLEWVSSISTGGGSTYYRDSVKGRFTISRDNSKSTLYLQMNSLRAEDTAVYYCTTDLSAIAATPFAYWGQGTLVTVSSASTKGPSVFPLAPSSKSTSGGTAALGCLVKDYFPEPVTVSWNSGALTSGVHTFPAVLQSSGLYSLSSVVTVPSSSLGTQTYICNVNHKPSDTKVDKKVEPKSCDKTHTCPPCPAPELLGGPDVFLFPPKPKDTLMISRTPEVTCVVVDVSHEDPEVKFNWYVDGVEVHNAKTKPREEEYNSTYRVVSVLTVLHQDWLNGKEYKCKVSNKALPAPIEKTISKAKGQPREPQVYTLPPSREEMTKNQVSLTCDVSGFYPSDIAVEWESDGQPENNYKTTPPVLDSDGSFFLYSKLTVDKSRWEQGDVFSCSVMHEALHNHYTQKSLSLSPGK

SEQ ID NO: 2335 - protein, 480 aa, synthetic construct; identical to SEQ ID NO: 2002
  source 1..480: note = XENP43716 Chain 2 - 6A1[B7H3]_H1L1_Fab-1D7B4[NKG2D]_H1L1_scFv(GKPGS)4-IgG1_pI(- )_Isosteric_A_S239D/L368D/K370S-Fc(216)_IgG1_C220S/S239D/S3 64K/E357Q

SEQ ID NO: 2336 - protein, 213 aa, synthetic construct; identical to SEQ ID NO: 150
  source 1..213: note = XENP43716 Chain 3 - 6A1[B7H3]_H1L1_Fab-1D7B4[NKG2D]_H1L1_scFv(GKPGS)4-IgG1_pI(- )_Isosteric_A_S239D/L368D/K370S-Fc(216)_IgG1_C220S/S239D/S3 64K/E357Q

SEQ ID NO: 2337 - protein, 451 aa, synthetic construct
  source 1..451: note = XENP43717 Chain 1 - 6A1[B7H3]_H1L1_Fab-1D7B4[NKG2D]_H1L1_scFv(GKPGS)4-IgG1_pI(- )_Isosteric_A_I332E/L368D/K370S-Fc(216)_IgG1_C220S/S239D/S3 64K/E357Q
EVQLLESGGGLVQPGGSLRLSCAASGFTFSNYYMAWVRQAPGKGLEWVSSISTGGGSTYYRDSVKGRFTISRDNSKSTLYLQMNSLRAEDTAVYYCTTDLSAIAATPFAYWGQGTLVTVSSASTKGPSVFPLAPSSKSTSGGTAALGCLVKDYFPEPVTVSWNSGALTSGVHTFPAVLQSSGLYSLSSVVTVPSSSLGTQTYICNVNHKPSDTKVDKKVEPKSCDKTHTCPPCPAPELLGGPSVFLFPPKPKDTLMISRTPEVTCVVVDVSHEDPEVKFNWYVDGVEVHNAKTKPREEEYNSTYRVVSVLTVLHQDWLNGKEYKCKVSNKALPAPEEKTISKAKGQPREPQVYTLPPSREEMTKNQVSLTCDVSGFYPSDIAVEWESDGQPENNYKTTPPVLDSDGSFFLYSKLTVDKSRWEQGDVFSCSVMHEALHNHYTQKSLSLSPGK

SEQ ID NO: 2338 - protein, 480 aa, synthetic construct; identical to SEQ ID NO: 2002
  source 1..480: note = XENP43717 Chain 2 - 6A1[B7H3]_H1L1_Fab-1D7B4[NKG2D]_H1L1_scFv(GKPGS)4-IgG1_pI(- )_Isosteric_A_I332E/L368D/K370S-Fc(216)_IgG1_C220S/S239D/S3 64K/E357Q

SEQ ID NO: 2339 - protein, 213 aa, synthetic construct; identical to SEQ ID NO: 150
  source 1..213: note = XENP43717 Chain 3 - 6A1[B7H3]_H1L1_Fab-1D7B4[NKG2D]_H1L1_scFv(GKPGS)4-IgG1_pI(- )_Isosteric_A_I332E/L368D/K370S-Fc(216)_IgG1_C220S/S239D/S3 64K/E357Q

SEQ ID NO: 2340 - protein, 451 aa, synthetic construct
  source 1..451: note = XENP43718 Chain 1 - 6A1[B7H3]_H1L1_Fab-1D7B4[NKG2D]_H1L1_scFv(GKPGS)4-IgG1_pI(- )_Isosteric_A_S239D/I332E/L368D/K370S-Fc(216)_IgG1_C220S/S2 39D/I332E/S364K/E357Q
EVQLLESGGGLVQPGGSLRLSCAASGFTFSNYYMAWVRQAPGKGLEWVSSISTGGGSTYYRDSVKGRFTISRDNSKSTLYLQMNSLRAEDTAVYYCTTDLSAIAATPFAYWGQGTLVTVSSASTKGPSVFPLAPSSKSTSGGTAALGCLVKDYFPEPVTVSWNSGALTSGVHTFPAVLQSSGLYSLSSVVTVPSSSLGTQTYICNVNHKPSDTKVDKKVEPKSCDKTHTCPPCPAPELLGGPDVFLFPPKPKDTLMISRTPEVTCVVVDVSHEDPEVKFNWYVDGVEVHNAKTKPREEEYNSTYRVVSVLTVLHQDWLNGKEYKCKVSNKALPAPEEKTISKAKGQPREPQVYTLPPSREEMTKNQVSLTCDVSGFYPSDIAVEWESDGQPENNYKTTPPVLDSDGSFFLYSKLTVDKSRWEQGDVFSCSVMHEALHNHYTQKSLSLSPGK

SEQ ID NO: 2341 - protein, 480 aa, synthetic construct; identical to SEQ ID NO: 5
  source 1..480: note = XENP43718 Chain 2 - 6A1[B7H3]_H1L1_Fab-1D7B4[NKG2D]_H1L1_scFv(GKPGS)4-IgG1_pI(- )_Isosteric_A_S239D/I332E/L368D/K370S-Fc(216)_IgG1_C220S/S2 39D/I332E/S364K/E357Q

SEQ ID NO: 2342 - protein, 213 aa, synthetic construct; identical to SEQ ID NO: 150
  source 1..213: note = XENP43718 Chain 3 - 6A1[B7H3]_H1L1_Fab-1D7B4[NKG2D]_H1L1_scFv(GKPGS)4-IgG1_pI(- )_Isosteric_A_S239D/I332E/L368D/K370S-Fc(216)_IgG1_C220S/S2 39D/I332E/S364K/E357Q

SEQ ID NO: 2343 - protein, 451 aa, synthetic construct; identical to SEQ ID NO: 1200
  source 1..451: note = XENP43719 Chain 1 - 6A1[B7H3]_H1L1_Fab-1D7B4[NKG2D]_H1.3_L1_scFv(GKPGS)4-IgG1_p I(-)_Isosteric_A_L368D/K370S-Fc(216)_IgG1_C220S/S364K/E357Q

SEQ ID NO: 2344 - protein, 480 aa, synthetic construct; identical to SEQ ID NO: 1308
  source 1..480: note = XENP43719 Chain 2 - 6A1[B7H3]_H1L1_Fab-1D7B4[NKG2D]_H1.3_L1_scFv(GKPGS)4-IgG1_p I(-)_Isosteric_A_L368D/K370S-Fc(216)_IgG1_C220S/S364K/E357Q

SEQ ID NO: 2345 - protein, 213 aa, synthetic construct; identical to SEQ ID NO: 150
  source 1..213: note = XENP43719 Chain 3 - 6A1[B7H3]_H1L1_Fab-1D7B4[NKG2D]_H1.3_L1_scFv(GKPGS)4-IgG1_p I(-)_Isosteric_A_L368D/K370S-Fc(216)_IgG1_C220S/S364K/E357Q

SEQ ID NO: 2346 - protein, 451 aa, synthetic construct; identical to SEQ ID NO: 1200
  source 1..451: note = XENP43720 Chain 1 - 6A1[B7H3]_H1L1_Fab-1D7B4[NKG2D]_H1.23_L1_scFv(GKPGS)4-IgG1_ pI(-)_Isosteric_A_L368D/K370S-Fc(216)_IgG1_C220S/S364K/E357 Q

SEQ ID NO: 2347 - protein, 480 aa, synthetic construct; identical to SEQ ID NO: 1310
  source 1..480: note = XENP43720 Chain 2 - 6A1[B7H3]_H1L1_Fab-1D7B4[NKG2D]_H1.23_L1_scFv(GKPGS)4-IgG1_ pI(-)_Isosteric_A_L368D/K370S-Fc(216)_IgG1_C220S/S364K/E357 Q

SEQ ID NO: 2348 - protein, 213 aa, synthetic construct; identical to SEQ ID NO: 150
  source 1..213: note = XENP43720 Chain 3 - 6A1[B7H3]_H1L1_Fab-1D7B4[NKG2D]_H1.23_L1_scFv(GKPGS)4-IgG1_ pI(-)_Isosteric_A_L368D/K370S-Fc(216)_IgG1_C220S/S364K/E357 Q

SEQ ID NO: 2349 - protein, 451 aa, synthetic construct; identical to SEQ ID NO: 1200
  source 1..451: note = XENP43721 Chain 1 - 6A1[B7H3]_H1L1_Fab-1D7B4[NKG2D]_H1.28_L1_scFv(GKPGS)4-IgG1_ pI(-)_Isosteric_A_L368D/K370S-Fc(216)_IgG1_C220S/S364K/E357 Q

SEQ ID NO: 2350 - protein, 480 aa, synthetic construct; identical to SEQ ID NO: 1312
  source 1..480: note = XENP43721 Chain 2 - 6A1[B7H3]_H1L1_Fab-1D7B4[NKG2D]_H1.28_L1_scFv(GKPGS)4-IgG1_ pI(-)_Isosteric_A_L368D/K370S-Fc(216)_IgG1_C220S/S364K/E357 Q

SEQ ID NO: 2351 - protein, 213 aa, synthetic construct; identical to SEQ ID NO: 150
  source 1..213: note = XENP43721 Chain 3 - 6A1[B7H3]_H1L1_Fab-1D7B4[NKG2D]_H1.28_L1_scFv(GKPGS)4-IgG1_ pI(-)_Isosteric_A_L368D/K370S-Fc(216)_IgG1_C220S/S364K/E357 Q

SEQ ID NO: 2352 - protein, 451 aa, synthetic construct; identical to SEQ ID NO: 1200
  source 1..451: note = XENP43723 Chain 1 - 6A1[B7H3]_H1L1_Fab-1D7B4[NKG2D]_H1.42_L1_scFv(GKPGS)4-IgG1_ pI(-)_Isosteric_A_L368D/K370S-Fc(216)_IgG1_C220S/S364K/E357 Q

SEQ ID NO: 2353 - protein, 480 aa, synthetic construct; identical to SEQ ID NO: 2026
  source 1..480: note = XENP43723 Chain 2 - 6A1[B7H3]_H1L1_Fab-1D7B4[NKG2D]_H1.42_L1_scFv(GKPGS)4-IgG1_ pI(-)_Isosteric_A_L368D/K370S-Fc(216)_IgG1_C220S/S364K/E357 Q

SEQ ID NO: 2354 - protein, 213 aa, synthetic construct; identical to SEQ ID NO: 150
  source 1..213: note = XENP43723 Chain 3 - 6A1[B7H3]_H1L1_Fab-1D7B4[NKG2D]_H1.42_L1_scFv(GKPGS)4-IgG1_ pI(-)_Isosteric_A_L368D/K370S-Fc(216)_IgG1_C220S/S364K/E357 Q

SEQ ID NO: 2355 - protein, 451 aa, synthetic construct; identical to SEQ ID NO: 2340
  source 1..451: note = XENP43724 Chain 1 - 6A1[B7H3]_H1L1_Fab-1D7B4[NKG2D]_H1.3_L1_scFv(GKPGS)4-IgG1_p I(-)_Isosteric_A_S239D/I332E/L368D/K370S-Fc(216)_IgG1_C220S /S239D/I332E/S364K/E357Q

SEQ ID NO: 2356 - protein, 480 aa, synthetic construct; identical to SEQ ID NO: 1191
  source 1..480: note = XENP43724 Chain 2 - 6A1[B7H3]_H1L1_Fab-1D7B4[NKG2D]_H1.3_L1_scFv(GKPGS)4-IgG1_p I(-)_Isosteric_A_S239D/I332E/L368D/K370S-Fc(216)_IgG1_C220S /S239D/I332E/S364K/E357Q

SEQ ID NO: 2357 - protein, 213 aa, synthetic construct; identical to SEQ ID NO: 150
  source 1..213: note = XENP43724 Chain 3 - 6A1[B7H3]_H1L1_Fab-1D7B4[NKG2D]_H1.3_L1_scFv(GKPGS)4-IgG1_p I(-)_Isosteric_A_S239D/I332E/L368D/K370S-Fc(216)_IgG1_C220S /S239D/I332E/S364K/E357Q

SEQ ID NO: 2358 - protein, 451 aa, synthetic construct; identical to SEQ ID NO: 2340
  source 1..451: note = XENP43725 Chain 1 - 6A1[B7H3]_H1L1_Fab-1D7B4[NKG2D]_H1.23_L1_scFv(GKPGS)4-IgG1_ pI(-)_Isosteric_A_S239D/I332E/L368D/K370S-Fc(216)_IgG1_C220 S/S239D/I332E/S364K/E357Q

SEQ ID NO: 2359 - protein, 480 aa, synthetic construct; identical to SEQ ID NO: 1193
  source 1..480: note = XENP43725 Chain 2 - 6A1[B7H3]_H1L1_Fab-1D7B4[NKG2D]_H1.23_L1_scFv(GKPGS)4-IgG1_ pI(-)_Isosteric_A_S239D/I332E/L368D/K370S-Fc(216)_IgG1_C220 S/S239D/I332E/S364K/E357Q

SEQ ID NO: 2360 - protein, 213 aa, synthetic construct; identical to SEQ ID NO: 150
  source 1..213: note = XENP43725 Chain 3 - 6A1[B7H3]_H1L1_Fab-1D7B4[NKG2D]_H1.23_L1_scFv(GKPGS)4-IgG1_ pI(-)_Isosteric_A_S239D/I332E/L368D/K370S-Fc(216)_IgG1_C220 S/S239D/I332E/S364K/E357Q

SEQ ID NO: 2361 - protein, 451 aa, synthetic construct; identical to SEQ ID NO: 2340
  source 1..451: note = XENP43726 Chain 1 - 6A1[B7H3]_H1L1_Fab-1D7B4[NKG2D]_H1.28_L1_scFv(GKPGS)4-IgG1_ pI(-)_Isosteric_A_S239D/I332E/L368D/K370S-Fc(216)_IgG1_C220 S/S239D/I332E/S364K/E357Q

SEQ ID NO: 2362 - protein, 480 aa, synthetic construct; identical to SEQ ID NO: 1195
  source 1..480: note = XENP43726 Chain 2 - 6A1[B7H3]_H1L1_Fab-1D7B4[NKG2D]_H1.28_L1_scFv(GKPGS)4-IgG1_ pI(-)_Isosteric_A_S239D/I332E/L368D/K370S-Fc(216)_IgG1_C220 S/S239D/I332E/S364K/E357Q

SEQ ID NO: 2363 - protein, 213 aa, synthetic construct; identical to SEQ ID NO: 150
  source 1..213: note = XENP43726 Chain 3 - 6A1[B7H3]_H1L1_Fab-1D7B4[NKG2D]_H1.28_L1_scFv(GKPGS)4-IgG1_ pI(-)_Isosteric_A_S239D/I332E/L368D/K370S-Fc(216)_IgG1_C220 S/S239D/I332E/S364K/E357Q

SEQ ID NO: 2364 - protein, 451 aa, synthetic construct; identical to SEQ ID NO: 2340
  source 1..451: note = XENP43727 Chain 1 - 6A1[B7H3]_H1L1_Fab-1D7B4[NKG2D]_H1.31_L1_scFv(GKPGS)4-IgG1_ pI(-)_Isosteric_A_S239D/I332E/L368D/K370S-Fc(216)_IgG1_C220 S/S239D/I332E/S364K/E357Q

SEQ ID NO: 2365 - protein, 480 aa, synthetic construct; identical to SEQ ID NO: 1197
  source 1..480: note = XENP43727 Chain 2 - 6A1[B7H3]_H1L1_Fab-1D7B4[NKG2D]_H1.31_L1_scFv(GKPGS)4-IgG1_ pI(-)_Isosteric_A_S239D/I332E/L368D/K370S-Fc(216)_IgG1_C220 S/S239D/I332E/S364K/E357Q

SEQ ID NO: 2366 - protein, 213 aa, synthetic construct; identical to SEQ ID NO: 150
  source 1..213: note = XENP43727 Chain 3 - 6A1[B7H3]_H1L1_Fab-1D7B4[NKG2D]_H1.31_L1_scFv(GKPGS)4-IgG1_ pI(-)_Isosteric_A_S239D/I332E/L368D/K370S-Fc(216)_IgG1_C220 S/S239D/I332E/S364K/E357Q

SEQ ID NO: 2367 - protein, 451 aa, synthetic construct; identical to SEQ ID NO: 2340
  source 1..451: note = XENP43728 Chain 1 - 6A1[B7H3]_H1L1_Fab-1D7B4[NKG2D]_H1.42_L1_scFv(GKPGS)4-IgG1_ pI(-)_Isosteric_A_S239D/I332E/L368D/K370S-Fc(216)_IgG1_C220 S/S239D/I332E/S364K/E357Q

SEQ ID NO: 2368 - protein, 480 aa, synthetic construct; identical to SEQ ID NO: 2029
  source 1..480: note = XENP43728 Chain 2 - 6A1[B7H3]_H1L1_Fab-1D7B4[NKG2D]_H1.42_L1_scFv(GKPGS)4-IgG1_ pI(-)_Isosteric_A_S239D/I332E/L368D/K370S-Fc(216)_IgG1_C220 S/S239D/I332E/S364K/E357Q

SEQ ID NO: 2369 - protein, 213 aa, synthetic construct; identical to SEQ ID NO: 150
  source 1..213: note = XENP43728 Chain 3 - 6A1[B7H3]_H1L1_Fab-1D7B4[NKG2D]_H1.42_L1_scFv(GKPGS)4-IgG1_ pI(-)_Isosteric_A_S239D/I332E/L368D/K370S-Fc(216)_IgG1_C220 S/S239D/I332E/S364K/E357Q

SEQ ID NO: 2370 - protein, 449 aa, synthetic construct; identical to SEQ ID NO: 2109
  source 1..449: note = XENP43852 Chain 1 - 2E4A3.189[B7H3]_H1.22_L1_Fab-1D7B4[NKG2D]_H1.8_L1_scFv(GKPG S)4-IgG1_pI(-)_Isosteric_A_L368D/K370S-Fc(216)_IgG1_C220S/S 364K/E357Q

SEQ ID NO: 2371 - protein, 480 aa, synthetic construct
  source 1..480: note = XENP43852 Chain 2 - 2E4A3.189[B7H3]_H1.22_L1_Fab-1D7B4[NKG2D]_H1.8_L1_scFv(GKPG S)4-IgG1_pI(-)_Isosteric_A_L368D/K370S-Fc(216)_IgG1_C220S/S 364K/E357Q
EVQLLESGGGLVQPGGSLRLSCAASGFTFSSYHMSWVRQAPGKGLEWVSSISASGGSTYYADSVKGRFTISRDNSKNTLYLQMNSLRAEDTAVYYCAKGIFSIYFFYFDYWGQGTLVTVSSGKPGSGKPGSGKPGSGKPGSDIQMTQSPSSLSASVGDRVTITCRASQSISSYLNWYQQKPGKAPKLLIYAASSLQSGVPSRFSGSGSGTDFTLTISSLQPEDFATYYCQQSYSTPYTFGQGTKLEIKEPKSSDKTHTCPPCPAPELLGGPSVFLFPPKPKDTLMISRTPEVTCVVVDVSHEDPEVKFNWYVDGVEVHNAKTKPREEQYNSTYRVVSVLTVLHQDWLNGKEYKCKVSNKALPAPIEKTISKAKGQPREPQVYTLPPSREQMTKNQVKLTCLVKGFYPSDIAVEWESNGQPENNYKTTPPVLDSDGSFFLYSKLTVDKSRWQQGNVFSCSVMHEALHNHYTQKSLSLSPGK

SEQ ID NO: 2372 - protein, 214 aa, synthetic construct; identical to SEQ ID NO: 2108
  source 1..214: note = XENP43852 Chain 3 - 2E4A3.189[B7H3]_H1.22_L1_Fab-1D7B4[NKG2D]_H1.8_L1_scFv(GKPG S)4-IgG1_pI(-)_Isosteric_A_L368D/K370S-Fc(216)_IgG1_C220S/S 364K/E357Q

SEQ ID NO: 2373 - protein, 449 aa, synthetic construct; identical to SEQ ID NO: 2109
  source 1..449: note = XENP43853 Chain 1 - 2E4A3.189[B7H3]_H1.22_L1_Fab-1D7B4[NKG2D]_H1.25_L1_scFv(GKP GS)4-IgG1_pI(-)_Isosteric_A_L368D/K370S-Fc(216)_IgG1_C220S/ S364K/E357Q

SEQ ID NO: 2374 - protein, 480 aa, synthetic construct
  source 1..480: note = XENP43853 Chain 2 - 2E4A3.189[B7H3]_H1.22_L1_Fab-1D7B4[NKG2D]_H1.25_L1_scFv(GKP GS)4-IgG1_pI(-)_Isosteric_A_L368D/K370S-Fc(216)_IgG1_C220S/ S364K/E357Q
EVQLLESGGGLVQPGGSLRLSCAASGFTFSSYAMSWVRQAPGKGLEWVSSISASGGSTYYADSVKGRFTISRDNSKNTLYLQMNSLRAEDTAVYYCAKGIFSAYFFYFDYWGQGTLVTVSSGKPGSGKPGSGKPGSGKPGSDIQMTQSPSSLSASVGDRVTITCRASQSISSYLNWYQQKPGKAPKLLIYAASSLQSGVPSRFSGSGSGTDFTLTISSLQPEDFATYYCQQSYSTPYTFGQGTKLEIKEPKSSDKTHTCPPCPAPELLGGPSVFLFPPKPKDTLMISRTPEVTCVVVDVSHEDPEVKFNWYVDGVEVHNAKTKPREEQYNSTYRVVSVLTVLHQDWLNGKEYKCKVSNKALPAPIEKTISKAKGQPREPQVYTLPPSREQMTKNQVKLTCLVKGFYPSDIAVEWESNGQPENNYKTTPPVLDSDGSFFLYSKLTVDKSRWQQGNVFSCSVMHEALHNHYTQKSLSLSPGK

SEQ ID NO: 2375 - protein, 214 aa, synthetic construct; identical to SEQ ID NO: 2108
  source 1..214: note = XENP43853 Chain 3 - 2E4A3.189[B7H3]_H1.22_L1_Fab-1D7B4[NKG2D]_H1.25_L1_scFv(GKP GS)4-IgG1_pI(-)_Isosteric_A_L368D/K370S-Fc(216)_IgG1_C220S/ S364K/E357Q

SEQ ID NO: 2376 - protein, 449 aa, synthetic construct; identical to SEQ ID NO: 2109
  source 1..449: note = XENP43854 Chain 1 - 2E4A3.189[B7H3]_H1.22_L1_Fab-1D7B4[NKG2D]_H1.26_L1_scFv(GKP GS)4-IgG1_pI(-)_Isosteric_A_L368D/K370S-Fc(216)_IgG1_C220S/ S364K/E357Q

SEQ ID NO: 2377 - protein, 480 aa, synthetic construct
  source 1..480: note = XENP43854 Chain 2 - 2E4A3.189[B7H3]_H1.22_L1_Fab-1D7B4[NKG2D]_H1.26_L1_scFv(GKP GS)4-IgG1_pI(-)_Isosteric_A_L368D/K370S-Fc(216)_IgG1_C220S/ S364K/E357Q
EVQLLESGGGLVQPGGSLRLSCAASGFTFSSYAMSWVRQAPGKGLEWVSSISASGGSTYYADSVKGRFTISRDNSKNTLYLQMNSLRAEDTAVYYCAKGIFSQYFFYFDYWGQGTLVTVSSGKPGSGKPGSGKPGSGKPGSDIQMTQSPSSLSASVGDRVTITCRASQSISSYLNWYQQKPGKAPKLLIYAASSLQSGVPSRFSGSGSGTDFTLTISSLQPEDFATYYCQQSYSTPYTFGQGTKLEIKEPKSSDKTHTCPPCPAPELLGGPSVFLFPPKPKDTLMISRTPEVTCVVVDVSHEDPEVKFNWYVDGVEVHNAKTKPREEQYNSTYRVVSVLTVLHQDWLNGKEYKCKVSNKALPAPIEKTISKAKGQPREPQVYTLPPSREQMTKNQVKLTCLVKGFYPSDIAVEWESNGQPENNYKTTPPVLDSDGSFFLYSKLTVDKSRWQQGNVFSCSVMHEALHNHYTQKSLSLSPGK

SEQ ID NO: 2378 - protein, 214 aa, synthetic construct; identical to SEQ ID NO: 2108
  source 1..214: note = XENP43854 Chain 3 - 2E4A3.189[B7H3]_H1.22_L1_Fab-1D7B4[NKG2D]_H1.26_L1_scFv(GKP GS)4-IgG1_pI(-)_Isosteric_A_L368D/K370S-Fc(216)_IgG1_C220S/ S364K/E357Q

SEQ ID NO: 2379 - protein, 449 aa, synthetic construct; identical to SEQ ID NO: 2109
  source 1..449: note = XENP43855 Chain 1 - 2E4A3.189[B7H3]_H1.22_L1_Fab-1D7B4[NKG2D]_H1.27_L1_scFv(GKP GS)4-IgG1_pI(-)_Isosteric_A_L368D/K370S-Fc(216)_IgG1_C220S/ S364K/E357Q

SEQ ID NO: 2380 - protein, 480 aa, synthetic construct
  source 1..480: note = XENP43855 Chain 2 - 2E4A3.189[B7H3]_H1.22_L1_Fab-1D7B4[NKG2D]_H1.27_L1_scFv(GKP GS)4-IgG1_pI(-)_Isosteric_A_L368D/K370S-Fc(216)_IgG1_C220S/ S364K/E357Q
EVQLLESGGGLVQPGGSLRLSCAASGFTFSSYAMSWVRQAPGKGLEWVSSISASGGSTYYADSVKGRFTISRDNSKNTLYLQMNSLRAEDTAVYYCAKGIFSEYFFYFDYWGQGTLVTVSSGKPGSGKPGSGKPGSGKPGSDIQMTQSPSSLSASVGDRVTITCRASQSISSYLNWYQQKPGKAPKLLIYAASSLQSGVPSRFSGSGSGTDFTLTISSLQPEDFATYYCQQSYSTPYTFGQGTKLEIKEPKSSDKTHTCPPCPAPELLGGPSVFLFPPKPKDTLMISRTPEVTCVVVDVSHEDPEVKFNWYVDGVEVHNAKTKPREEQYNSTYRVVSVLTVLHQDWLNGKEYKCKVSNKALPAPIEKTISKAKGQPREPQVYTLPPSREQMTKNQVKLTCLVKGFYPSDIAVEWESNGQPENNYKTTPPVLDSDGSFFLYSKLTVDKSRWQQGNVFSCSVMHEALHNHYTQKSLSLSPGK

SEQ ID NO: 2381 - protein, 214 aa, synthetic construct; identical to SEQ ID NO: 2108
  source 1..214: note = XENP43855 Chain 3 - 2E4A3.189[B7H3]_H1.22_L1_Fab-1D7B4[NKG2D]_H1.27_L1_scFv(GKP GS)4-IgG1_pI(-)_Isosteric_A_L368D/K370S-Fc(216)_IgG1_C220S/ S364K/E357Q

SEQ ID NO: 2382 - protein, 449 aa, synthetic construct; identical to SEQ ID NO: 2109
  source 1..449: note = XENP43856 Chain 1 - 2E4A3.189[B7H3]_H1.22_L1_Fab-1D7B4[NKG2D]_H1.29_L1_scFv(GKP GS)4-IgG1_pI(-)_Isosteric_A_L368D/K370S-Fc(216)_IgG1_C220S/ S364K/E357Q

SEQ ID NO: 2383 - protein, 480 aa, synthetic construct
  source 1..480: note = XENP43856 Chain 2 - 2E4A3.189[B7H3]_H1.22_L1_Fab-1D7B4[NKG2D]_H1.29_L1_scFv(GKP GS)4-IgG1_pI(-)_Isosteric_A_L368D/K370S-Fc(216)_IgG1_C220S/ S364K/E357Q
EVQLLESGGGLVQPGGSLRLSCAASGFTFSSYAMSWVRQAPGKGLEWVSSISASGGSTYYADSVKGRFTISRDNSKNTLYLQMNSLRAEDTAVYYCAKGIFSSYFFYFDYWGQGTLVTVSSGKPGSGKPGSGKPGSGKPGSDIQMTQSPSSLSASVGDRVTITCRASQSISSYLNWYQQKPGKAPKLLIYAASSLQSGVPSRFSGSGSGTDFTLTISSLQPEDFATYYCQQSYSTPYTFGQGTKLEIKEPKSSDKTHTCPPCPAPELLGGPSVFLFPPKPKDTLMISRTPEVTCVVVDVSHEDPEVKFNWYVDGVEVHNAKTKPREEQYNSTYRVVSVLTVLHQDWLNGKEYKCKVSNKALPAPIEKTISKAKGQPREPQVYTLPPSREQMTKNQVKLTCLVKGFYPSDIAVEWESNGQPENNYKTTPPVLDSDGSFFLYSKLTVDKSRWQQGNVFSCSVMHEALHNHYTQKSLSLSPGK

SEQ ID NO: 2384 - protein, 214 aa, synthetic construct; identical to SEQ ID NO: 2108
  source 1..214: note = XENP43856 Chain 3 - 2E4A3.189[B7H3]_H1.22_L1_Fab-1D7B4[NKG2D]_H1.29_L1_scFv(GKP GS)4-IgG1_pI(-)_Isosteric_A_L368D/K370S-Fc(216)_IgG1_C220S/ S364K/E357Q

SEQ ID NO: 2385 - protein, 449 aa, synthetic construct; identical to SEQ ID NO: 2109
  source 1..449: note = XENP43857 Chain 1 - 2E4A3.189[B7H3]_H1.22_L1_Fab-1D7B4[NKG2D]_H1.36_L1_scFv(GKP GS)4-IgG1_pI(-)_Isosteric_A_L368D/K370S-Fc(216)_IgG1_C220S/ S364K/E357Q

SEQ ID NO: 2386 - protein, 480 aa, synthetic construct
  source 1..480: note = XENP43857 Chain 2 - 2E4A3.189[B7H3]_H1.22_L1_Fab-1D7B4[NKG2D]_H1.36_L1_scFv(GKP GS)4-IgG1_pI(-)_Isosteric_A_L368D/K370S-Fc(216)_IgG1_C220S/ S364K/E357Q
EVQLLESGGGLVQPGGSLRLSCAASGFTFSSYAMSWVRQAPGKGLEWVSSISASGGSTYYADSVKGRFTISRDNSKNTLYLQMNSLRAEDTAVYYCAKGIFSIYHFYFDYWGQGTLVTVSSGKPGSGKPGSGKPGSGKPGSDIQMTQSPSSLSASVGDRVTITCRASQSISSYLNWYQQKPGKAPKLLIYAASSLQSGVPSRFSGSGSGTDFTLTISSLQPEDFATYYCQQSYSTPYTFGQGTKLEIKEPKSSDKTHTCPPCPAPELLGGPSVFLFPPKPKDTLMISRTPEVTCVVVDVSHEDPEVKFNWYVDGVEVHNAKTKPREEQYNSTYRVVSVLTVLHQDWLNGKEYKCKVSNKALPAPIEKTISKAKGQPREPQVYTLPPSREQMTKNQVKLTCLVKGFYPSDIAVEWESNGQPENNYKTTPPVLDSDGSFFLYSKLTVDKSRWQQGNVFSCSVMHEALHNHYTQKSLSLSPGK

SEQ ID NO: 2387 - protein, 214 aa, synthetic construct; identical to SEQ ID NO: 2108
  source 1..214: note = XENP43857 Chain 3 - 2E4A3.189[B7H3]_H1.22_L1_Fab-1D7B4[NKG2D]_H1.36_L1_scFv(GKP GS)4-IgG1_pI(-)_Isosteric_A_L368D/K370S-Fc(216)_IgG1_C220S/ S364K/E357Q

SEQ ID NO: 2388 - protein, 449 aa, synthetic construct; identical to SEQ ID NO: 2109
  source 1..449: note = XENP43858 Chain 1 - 2E4A3.189[B7H3]_H1.22_L1_Fab-1D7B4[NKG2D]_H1.38_L1_scFv(GKP GS)4-IgG1_pI(-)_Isosteric_A_L368D/K370S-Fc(216)_IgG1_C220S/ S364K/E357Q

SEQ ID NO: 2389 - protein, 480 aa, synthetic construct
  source 1..480: note = XENP43858 Chain 2 - 2E4A3.189[B7H3]_H1.22_L1_Fab-1D7B4[NKG2D]_H1.38_L1_scFv(GKP GS)4-IgG1_pI(-)_Isosteric_A_L368D/K370S-Fc(216)_IgG1_C220S/ S364K/E357Q
EVQLLESGGGLVQPGGSLRLSCAASGFTFSSYAMSWVRQAPGKGLEWVSSISASGGSTYYADSVKGRFTISRDNSKNTLYLQMNSLRAEDTAVYYCAKGIFSIYSFYFDYWGQGTLVTVSSGKPGSGKPGSGKPGSGKPGSDIQMTQSPSSLSASVGDRVTITCRASQSISSYLNWYQQKPGKAPKLLIYAASSLQSGVPSRFSGSGSGTDFTLTISSLQPEDFATYYCQQSYSTPYTFGQGTKLEIKEPKSSDKTHTCPPCPAPELLGGPSVFLFPPKPKDTLMISRTPEVTCVVVDVSHEDPEVKFNWYVDGVEVHNAKTKPREEQYNSTYRVVSVLTVLHQDWLNGKEYKCKVSNKALPAPIEKTISKAKGQPREPQVYTLPPSREQMTKNQVKLTCLVKGFYPSDIAVEWESNGQPENNYKTTPPVLDSDGSFFLYSKLTVDKSRWQQGNVFSCSVMHEALHNHYTQKSLSLSPGK

SEQ ID NO: 2390 - protein, 214 aa, synthetic construct; identical to SEQ ID NO: 2108
  source 1..214: note = XENP43858 Chain 3 - 2E4A3.189[B7H3]_H1.22_L1_Fab-1D7B4[NKG2D]_H1.38_L1_scFv(GKP GS)4-IgG1_pI(-)_Isosteric_A_L368D/K370S-Fc(216)_IgG1_C220S/ S364K/E357Q

SEQ ID NO: 2391 - protein, 449 aa, synthetic construct; identical to SEQ ID NO: 2109
  source 1..449: note = XENP43859 Chain 1 - 2E4A3.189[B7H3]_H1.22_L1_Fab-1D7B4[NKG2D]_H1.39_L1_scFv(GKP GS)4-IgG1_pI(-)_Isosteric_A_L368D/K370S-Fc(216)_IgG1_C220S/ S364K/E357Q

SEQ ID NO: 2392 - protein, 480 aa, synthetic construct
  source 1..480: note = XENP43859 Chain 2 - 2E4A3.189[B7H3]_H1.22_L1_Fab-1D7B4[NKG2D]_H1.39_L1_scFv(GKP GS)4-IgG1_pI(-)_Isosteric_A_L368D/K370S-Fc(216)_IgG1_C220S/ S364K/E357Q
EVQLLESGGGLVQPGGSLRLSCAASGFTFSSYAMSWVRQAPGKGLEWVSSISASGGSTYYADSVKGRFTISRDNSKNTLYLQMNSLRAEDTAVYYCAKGIFSIYEFYFDYWGQGTLVTVSSGKPGSGKPGSGKPGSGKPGSDIQMTQSPSSLSASVGDRVTITCRASQSISSYLNWYQQKPGKAPKLLIYAASSLQSGVPSRFSGSGSGTDFTLTISSLQPEDFATYYCQQSYSTPYTFGQGTKLEIKEPKSSDKTHTCPPCPAPELLGGPSVFLFPPKPKDTLMISRTPEVTCVVVDVSHEDPEVKFNWYVDGVEVHNAKTKPREEQYNSTYRVVSVLTVLHQDWLNGKEYKCKVSNKALPAPIEKTISKAKGQPREPQVYTLPPSREQMTKNQVKLTCLVKGFYPSDIAVEWESNGQPENNYKTTPPVLDSDGSFFLYSKLTVDKSRWQQGNVFSCSVMHEALHNHYTQKSLSLSPGK

SEQ ID NO: 2393 - protein, 214 aa, synthetic construct; identical to SEQ ID NO: 2108
  source 1..214: note = XENP43859 Chain 3 - 2E4A3.189[B7H3]_H1.22_L1_Fab-1D7B4[NKG2D]_H1.39_L1_scFv(GKP GS)4-IgG1_pI(-)_Isosteric_A_L368D/K370S-Fc(216)_IgG1_C220S/ S364K/E357Q

SEQ ID NO: 2394 - protein, 449 aa, synthetic construct; identical to SEQ ID NO: 2109
  source 1..449: note = XENP43860 Chain 1 - 2E4A3.189[B7H3]_H1.22_L1_Fab-1D7B4[NKG2D]_H1.45_L1_scFv(GKP GS)4-IgG1_pI(-)_Isosteric_A_L368D/K370S-Fc(216)_IgG1_C220S/ S364K/E357Q

SEQ ID NO: 2395 - protein, 480 aa, synthetic construct
  source 1..480: note = XENP43860 Chain 2 - 2E4A3.189[B7H3]_H1.22_L1_Fab-1D7B4[NKG2D]_H1.45_L1_scFv(GKP GS)4-IgG1_pI(-)_Isosteric_A_L368D/K370S-Fc(216)_IgG1_C220S/ S364K/E357Q
EVQLLESGGGLVQPGGSLRLSCAASGFTFSSYAMSWVRQAPGKGLEWVSSISASGGSTYYADSVKGRFTISRDNSKNTLYLQMNSLRAEDTAVYYCAKGIFSIYFEYFDYWGQGTLVTVSSGKPGSGKPGSGKPGSGKPGSDIQMTQSPSSLSASVGDRVTITCRASQSISSYLNWYQQKPGKAPKLLIYAASSLQSGVPSRFSGSGSGTDFTLTISSLQPEDFATYYCQQSYSTPYTFGQGTKLEIKEPKSSDKTHTCPPCPAPELLGGPSVFLFPPKPKDTLMISRTPEVTCVVVDVSHEDPEVKFNWYVDGVEVHNAKTKPREEQYNSTYRVVSVLTVLHQDWLNGKEYKCKVSNKALPAPIEKTISKAKGQPREPQVYTLPPSREQMTKNQVKLTCLVKGFYPSDIAVEWESNGQPENNYKTTPPVLDSDGSFFLYSKLTVDKSRWQQGNVFSCSVMHEALHNHYTQKSLSLSPGK

SEQ ID NO: 2396 - protein, 214 aa, synthetic construct; identical to SEQ ID NO: 2108
  source 1..214: note = XENP43860 Chain 3 - 2E4A3.189[B7H3]_H1.22_L1_Fab-1D7B4[NKG2D]_H1.45_L1_scFv(GKP GS)4-IgG1_pI(-)_Isosteric_A_L368D/K370S-Fc(216)_IgG1_C220S/ S364K/E357Q

SEQ ID NO: 2397 - protein, 449 aa, synthetic construct; identical to SEQ ID NO: 2295
  source 1..449: note = XENP43915 Chain 1 - 2E4A3.189[B7H3]_H1.22_L1_Fab-1D7B4[NKG2D]_H1L1_scFv(GKPGS)4 -IgG1_pI(-)_Isosteric_A_S239D/L368D/K370S-Fc(216)_IgG1_C220 S/S239D/S364K/E357Q

SEQ ID NO: 2398 - protein, 480 aa, synthetic construct; identical to SEQ ID NO: 2002
  source 1..480: note = XENP43915 Chain 2 - 2E4A3.189[B7H3]_H1.22_L1_Fab-1D7B4[NKG2D]_H1L1_scFv(GKPGS)4 -IgG1_pI(-)_Isosteric_A_S239D/L368D/K370S-Fc(216)_IgG1_C220 S/S239D/S364K/E357Q

SEQ ID NO: 2399 - protein, 214 aa, synthetic construct; identical to SEQ ID NO: 2108
  source 1..214: note = XENP43915 Chain 3 - 2E4A3.189[B7H3]_H1.22_L1_Fab-1D7B4[NKG2D]_H1L1_scFv(GKPGS)4 -IgG1_pI(-)_Isosteric_A_S239D/L368D/K370S-Fc(216)_IgG1_C220 S/S239D/S364K/E357Q

SEQ ID NO: 2400 - protein, 449 aa, synthetic construct; identical to SEQ ID NO: 2313
  source 1..449: note = XENP43916 Chain 1 - 2E4A3.189[B7H3]_H1.22_L1_Fab-1D7B4[NKG2D]_H1L1_scFv(GKPGS)4 -IgG1_pI(-)_Isosteric_A_I332E/L368D/K370S-Fc(216)_IgG1_C220 S/S239D/S364K/E357Q

SEQ ID NO: 2401 - protein, 480 aa, synthetic construct; identical to SEQ ID NO: 2002
  source 1..480: note = XENP43916 Chain 2 - 2E4A3.189[B7H3]_H1.22_L1_Fab-1D7B4[NKG2D]_H1L1_scFv(GKPGS)4 -IgG1_pI(-)_Isosteric_A_I332E/L368D/K370S-Fc(216)_IgG1_C220 S/S239D/S364K/E357Q

SEQ ID NO: 2402 - protein, 214 aa, synthetic construct; identical to SEQ ID NO: 2108
  source 1..214: note = XENP43916 Chain 3 - 2E4A3.189[B7H3]_H1.22_L1_Fab-1D7B4[NKG2D]_H1L1_scFv(GKPGS)4 -IgG1_pI(-)_Isosteric_A_I332E/L368D/K370S-Fc(216)_IgG1_C220 S/S239D/S364K/E357Q

SEQ ID NO: 2403 - protein, 448 aa, synthetic construct; identical to SEQ ID NO: 2106
  source 1..448: note = XENP43927 Chain 1 - 2E4A3.189[B7H3]_H1.22_L1_Fab-humON72[NKG2D]_H1L1_scFv(GKPGS )4-IgG1_pI(-)_Isosteric_A_PVA_/S267K/L368D/K370S-Fc(216)_Ig G1_C220S/PVA_/S267K/S364K/E357Q

SEQ ID NO: 2404 - protein, 480 aa, synthetic construct; identical to SEQ ID NO: 1775
  source 1..480: note = XENP43927 Chain 2 - 2E4A3.189[B7H3]_H1.22_L1_Fab-humON72[NKG2D]_H1L1_scFv(GKPGS )4-IgG1_pI(-)_Isosteric_A_PVA_/S267K/L368D/K370S-Fc(216)_Ig G1_C220S/PVA_/S267K/S364K/E357Q

SEQ ID NO: 2405 - protein, 214 aa, synthetic construct; identical to SEQ ID NO: 2108
  source 1..214: note = XENP43927 Chain 3 - 2E4A3.189[B7H3]_H1.22_L1_Fab-humON72[NKG2D]_H1L1_scFv(GKPGS )4-IgG1_pI(-)_Isosteric_A_PVA_/S267K/L368D/K370S-Fc(216)_Ig G1_C220S/PVA_/S267K/S364K/E357Q

SEQ ID NO: 2406 - protein, 449 aa, synthetic construct; identical to SEQ ID NO: 2109
  source 1..449: note = XENP43928 Chain 1 - 2E4A3.189[B7H3]_H1.22_L1_Fab-humON72[NKG2D]_H1L1_scFv(GKPGS )4-IgG1_pI(-)_Isosteric_A_L368D/K370S-Fc(216)_IgG1_C220S/S3 64K/E357Q

SEQ ID NO: 2407 - protein, 481 aa, synthetic construct; identical to SEQ ID NO: 1772
  source 1..481: note = XENP43928 Chain 2 - 2E4A3.189[B7H3]_H1.22_L1_Fab-humON72[NKG2D]_H1L1_scFv(GKPGS )4-IgG1_pI(-)_Isosteric_A_L368D/K370S-Fc(216)_IgG1_C220S/S3 64K/E357Q

SEQ ID NO: 2408 - protein, 214 aa, synthetic construct; identical to SEQ ID NO: 2108
  source 1..214: note = XENP43928 Chain 3 - 2E4A3.189[B7H3]_H1.22_L1_Fab-humON72[NKG2D]_H1L1_scFv(GKPGS )4-IgG1_pI(-)_Isosteric_A_L368D/K370S-Fc(216)_IgG1_C220S/S3 64K/E357Q

SEQ ID NO: 2409 - protein, 449 aa, synthetic construct; identical to SEQ ID NO: 2112
  source 1..449: note = XENP43929 Chain 1 - 2E4A3.189[B7H3]_H1.22_L1_Fab-humON72[NKG2D]_H1L1_scFv(GKPGS )4-IgG1_pI(-)_Isosteric_A_S239D/I332E/L368D/K370S-Fc(216)_I gG1_C220S/S239D/I332E/S364K/E357Q

SEQ ID NO: 2410 - protein, 481 aa, synthetic construct; identical to SEQ ID NO: 1778
  source 1..481: note = XENP43929 Chain 2 - 2E4A3.189[B7H3]_H1.22_L1_Fab-humON72[NKG2D]_H1L1_scFv(GKPGS )4-IgG1_pI(-)_Isosteric_A_S239D/I332E/L368D/K370S-Fc(216)_I gG1_C220S/S239D/I332E/S364K/E357Q

SEQ ID NO: 2411 - protein, 214 aa, synthetic construct; identical to SEQ ID NO: 2108
  source 1..214: note = XENP43929 Chain 3 - 2E4A3.189[B7H3]_H1.22_L1_Fab-humON72[NKG2D]_H1L1_scFv(GKPGS )4-IgG1_pI(-)_Isosteric_A_S239D/I332E/L368D/K370S-Fc(216)_I gG1_C220S/S239D/I332E/S364K/E357Q

SEQ ID NO: 2412 - protein, 449 aa, synthetic construct; identical to SEQ ID NO: 2109
  source 1..449: note = XENP43930 Chain 1 - 2E4A3.189[B7H3]_H1.22_L1_Fab-humON72[NKG2D]_L1H1_scFv(GKPGS )4-IgG1_pI(-)_Isosteric_A_L368D/K370S-Fc(216)_IgG1_C220S/S3 64K/E357Q

SEQ ID NO: 2413 - protein, 481 aa, synthetic construct
  source 1..481: note = XENP43930 Chain 2 - 2E4A3.189[B7H3]_H1.22_L1_Fab-humON72[NKG2D]_L1H1_scFv(GKPGS )4-IgG1_pI(-)_Isosteric_A_L368D/K370S-Fc(216)_IgG1_C220S/S3 64K/E357Q
YIQMTQSPSSLSASVGDRVTITCRSSQDISNYLNWYQQKPGKAPKLLIYYTSRLHSGVPSRFSGSGSGTDFTFTISSLQPEDIATYYCQQGKTLPRTFGGGTKVEIKGKPGSGKPGSGKPGSGKPGSQVQLVQSGAEVKKPGASVKVSCKASGYTFTNYWMHWVRQAPGQGLEWMGEIDPSDIYTNYAQKFQGRVTMTRDTSTSTVYMELSSLRSEDTAVYYCARGIYDGYYVYGMDYWGQGTTVTVSSEPKSSDKTHTCPPCPAPELLGGPSVFLFPPKPKDTLMISRTPEVTCVVVDVSHEDPEVKFNWYVDGVEVHNAKTKPREEQYNSTYRVVSVLTVLHQDWLNGKEYKCKVSNKALPAPIEKTISKAKGQPREPQVYTLPPSREQMTKNQVKLTCLVKGFYPSDIAVEWESNGQPENNYKTTPPVLDSDGSFFLYSKLTVDKSRWQQGNVFSCSVMHEALHNHYTQKSLSLSPGK

SEQ ID NO: 2414 - protein, 214 aa, synthetic construct; identical to SEQ ID NO: 2108
  source 1..214: note = XENP43930 Chain 3 - 2E4A3.189[B7H3]_H1.22_L1_Fab-humON72[NKG2D]_L1H1_scFv(GKPGS )4-IgG1_pI(-)_Isosteric_A_L368D/K370S-Fc(216)_IgG1_C220S/S3 64K/E357Q

SEQ ID NO: 2415 - protein, 450 aa, synthetic construct; identical to SEQ ID NO: 2331
  source 1..450: note = XENP43931 Chain 1 - 6A1[B7H3]_H1L1_Fab-humON72[NKG2D]_H1L1_scFv(GKPGS)4-IgG1_pI (-)_Isosteric_A_PVA_/S267K/L368D/K370S-Fc(216)_IgG1_C220S/P VA_/S267K/S364K/E357Q

SEQ ID NO: 2416 - protein, 480 aa, synthetic construct; identical to SEQ ID NO: 1775
  source 1..480: note = XENP43931 Chain 2 - 6A1[B7H3]_H1L1_Fab-humON72[NKG2D]_H1L1_scFv(GKPGS)4-IgG1_pI (-)_Isosteric_A_PVA_/S267K/L368D/K370S-Fc(216)_IgG1_C220S/P VA_/S267K/S364K/E357Q

SEQ ID NO: 2417 - protein, 213 aa, synthetic construct; identical to SEQ ID NO: 150
  source 1..213: note = XENP43931 Chain 3 - 6A1[B7H3]_H1L1_Fab-humON72[NKG2D]_H1L1_scFv(GKPGS)4-IgG1_pI (-)_Isosteric_A_PVA_/S267K/L368D/K370S-Fc(216)_IgG1_C220S/P VA_/S267K/S364K/E357Q

SEQ ID NO: 2418 - protein, 451 aa, synthetic construct; identical to SEQ ID NO: 1200
  source 1..451: note = XENP43932 Chain 1 - 6A1[B7H3]_H1L1_Fab-humON72[NKG2D]_H1L1_scFv(GKPGS)4-IgG1_pI (-)_Isosteric_A_L368D/K370S-Fc(216)_IgG1_C220S/S364K/E357Q

SEQ ID NO: 2419 - protein, 481 aa, synthetic construct; identical to SEQ ID NO: 1772
  source 1..481: note = XENP43932 Chain 2 - 6A1[B7H3]_H1L1_Fab-humON72[NKG2D]_H1L1_scFv(GKPGS)4-IgG1_pI (-)_Isosteric_A_L368D/K370S-Fc(216)_IgG1_C220S/S364K/E357Q

SEQ ID NO: 2420 - protein, 213 aa, synthetic construct; identical to SEQ ID NO: 150
  source 1..213: note = XENP43932 Chain 3 - 6A1[B7H3]_H1L1_Fab-humON72[NKG2D]_H1L1_scFv(GKPGS)4-IgG1_pI (-)_Isosteric_A_L368D/K370S-Fc(216)_IgG1_C220S/S364K/E357Q

SEQ ID NO: 2421 - protein, 451 aa, synthetic construct; identical to SEQ ID NO: 2340
  source 1..451: note = XENP43933 Chain 1 - 6A1[B7H3]_H1L1_Fab-humON72[NKG2D]_H1L1_scFv(GKPGS)4-IgG1_pI (-)_Isosteric_A_S239D/I332E/L368D/K370S-Fc(216)_IgG1_C220S/ S239D/I332E/S364K/E357Q

SEQ ID NO: 2422 - protein, 481 aa, synthetic construct; identical to SEQ ID NO: 1778
  source 1..481: note = XENP43933 Chain 2 - 6A1[B7H3]_H1L1_Fab-humON72[NKG2D]_H1L1_scFv(GKPGS)4-IgG1_pI (-)_Isosteric_A_S239D/I332E/L368D/K370S-Fc(216)_IgG1_C220S/ S239D/I332E/S364K/E357Q

SEQ ID NO: 2423 - protein, 213 aa, synthetic construct; identical to SEQ ID NO: 150
  source 1..213: note = XENP43933 Chain 3 - 6A1[B7H3]_H1L1_Fab-humON72[NKG2D]_H1L1_scFv(GKPGS)4-IgG1_pI (-)_Isosteric_A_S239D/I332E/L368D/K370S-Fc(216)_IgG1_C220S/ S239D/I332E/S364K/E357Q

SEQ ID NO: 2424 - protein, 451 aa, synthetic construct; identical to SEQ ID NO: 1200
  source 1..451: note = XENP43934 Chain 1 - 6A1[B7H3]_H1L1_Fab-humON72[NKG2D]_L1H1_scFv(GKPGS)4-IgG1_pI (-)_Isosteric_A_L368D/K370S-Fc(216)_IgG1_C220S/S364K/E357Q

SEQ ID NO: 2425 - protein, 481 aa, synthetic construct; identical to SEQ ID NO: 2413
  source 1..481: note = XENP43934 Chain 2 - 6A1[B7H3]_H1L1_Fab-humON72[NKG2D]_L1H1_scFv(GKPGS)4-IgG1_pI (-)_Isosteric_A_L368D/K370S-Fc(216)_IgG1_C220S/S364K/E357Q

SEQ ID NO: 2426 - protein, 213 aa, synthetic construct; identical to SEQ ID NO: 150
  source 1..213: note = XENP43934 Chain 3 - 6A1[B7H3]_H1L1_Fab-humON72[NKG2D]_L1H1_scFv(GKPGS)4-IgG1_pI (-)_Isosteric_A_L368D/K370S-Fc(216)_IgG1_C220S/S364K/E357Q

SEQ ID NO: 2427 - protein, 448 aa, synthetic construct; identical to SEQ ID NO: 2106
  source 1..448: note = XENP43935 Chain 1 - 2E4A3.189[B7H3]_H1.22_L1_Fab-6E5A7[NKG2D]_H2L1_scFv(GKPGS)4 -IgG1_pI(-)_Isosteric_A_PVA_/S267K/L368D/K370S-Fc(216)_IgG1 _C220S/PVA_/S267K/S364K/E357Q

SEQ ID NO: 2428 - protein, 478 aa, synthetic construct
  source 1..478: note = XENP43935 Chain 2 - 2E4A3.189[B7H3]_H1.22_L1_Fab-6E5A7[NKG2D]_H2L1_scFv(GKPGS)4 -IgG1_pI(-)_Isosteric_A_PVA_/S267K/L368D/K370S-Fc(216)_IgG1 _C220S/PVA_/S267K/S364K/E357Q
QVQLVQSGAEVKKPGASVKVSCKVSGFSLTIYGVHWVRQAPGQGLEWMGVIWSGGSTDYNAKFQGRVTMTKDNSKRTVYMELSSLRSEDTAVYYCSRKSHDGYYGVMDYWGQGTTVTVSSGKPGSGKPGSGKPGSGKPGSDIQLTQSPDFQSVTPKEKVTITCRASQSIGTSIHWYQQKPDQSPKLLIKYASESISGIPSRFSGSGSGTDFTLTINSLEAEDAATYYCQQSNTWPLTFGAGTKVEIKEPKSSDKTHTCPPCPAPPVAGPSVFLFPPKPKDTLMISRTPEVTCVVVDVKHEDPEVKFNWYVDGVEVHNAKTKPREEQYNSTYRVVSVLTVLHQDWLNGKEYKCKVSNKALPAPIEKTISKAKGQPREPQVYTLPPSREQMTKNQVKLTCLVKGFYPSDIAVEWESNGQPENNYKTTPPVLDSDGSFFLYSKLTVDKSRWQQGNVFSCSVMHEALHNHYTQKSLSLSPGK

SEQ ID NO: 2429 - protein, 214 aa, synthetic construct; identical to SEQ ID NO: 2108
  source 1..214: note = XENP43935 Chain 3 - 2E4A3.189[B7H3]_H1.22_L1_Fab-6E5A7[NKG2D]_H2L1_scFv(GKPGS)4 -IgG1_pI(-)_Isosteric_A_PVA_/S267K/L368D/K370S-Fc(216)_IgG1 _C220S/PVA_/S267K/S364K/E357Q

SEQ ID NO: 2430 - protein, 449 aa, synthetic construct; identical to SEQ ID NO: 2112
  source 1..449: note = XENP43936 Chain 1 - 2E4A3.189[B7H3]_H1.22_L1_Fab-6E5A7[NKG2D]_H2L1_scFv(GKPGS)4 -IgG1_pI(-)_Isosteric_A_S239D/I332E/L368D/K370S-Fc(216)_IgG 1_C220S/S239D/I332E/S364K/E357Q

SEQ ID NO: 2431 - protein, 479 aa, synthetic construct
  source 1..479: note = XENP43936 Chain 2 - 2E4A3.189[B7H3]_H1.22_L1_Fab-6E5A7[NKG2D]_H2L1_scFv(GKPGS)4 -IgG1_pI(-)_Isosteric_A_S239D/I332E/L368D/K370S-Fc(216)_IgG 1_C220S/S239D/I332E/S364K/E357Q
QVQLVQSGAEVKKPGASVKVSCKVSGFSLTIYGVHWVRQAPGQGLEWMGVIWSGGSTDYNAKFQGRVTMTKDNSKRTVYMELSSLRSEDTAVYYCSRKSHDGYYGVMDYWGQGTTVTVSSGKPGSGKPGSGKPGSGKPGSDIQLTQSPDFQSVTPKEKVTITCRASQSIGTSIHWYQQKPDQSPKLLIKYASESISGIPSRFSGSGSGTDFTLTINSLEAEDAATYYCQQSNTWPLTFGAGTKVEIKEPKSSDKTHTCPPCPAPELLGGPDVFLFPPKPKDTLMISRTPEVTCVVVDVSHEDPEVKFNWYVDGVEVHNAKTKPREEQYNSTYRVVSVLTVLHQDWLNGKEYKCKVSNKALPAPEEKTISKAKGQPREPQVYTLPPSREQMTKNQVKLTCLVKGFYPSDIAVEWESNGQPENNYKTTPPVLDSDGSFFLYSKLTVDKSRWQQGNVFSCSVMHEALHNHYTQKSLSLSPGK

SEQ ID NO: 2432 - protein, 214 aa, synthetic construct; identical to SEQ ID NO: 2108
  source 1..214: note = XENP43936 Chain 3 - 2E4A3.189[B7H3]_H1.22_L1_Fab-6E5A7[NKG2D]_H2L1_scFv(GKPGS)4 -IgG1_pI(-)_Isosteric_A_S239D/I332E/L368D/K370S-Fc(216)_IgG 1_C220S/S239D/I332E/S364K/E357Q

SEQ ID NO: 2433 - protein, 450 aa, synthetic construct; identical to SEQ ID NO: 2331
  source 1..450: note = XENP43937 Chain 1 - 6A1[B7H3]_H1L1_Fab-6E5A7[NKG2D]_H2L1_scFv(GKPGS)4-IgG1_pI(- )_Isosteric_A_PVA_/S267K/L368D/K370S-Fc(216)_IgG1_C220S/PVA _/S267K/S364K/E357Q

SEQ ID NO: 2434 - protein, 478 aa, synthetic construct; identical to SEQ ID NO: 2428
  source 1..478: note = XENP43937 Chain 2 - 6A1[B7H3]_H1L1_Fab-6E5A7[NKG2D]_H2L1_scFv(GKPGS)4-IgG1_pI(- )_Isosteric_A_PVA_/S267K/L368D/K370S-Fc(216)_IgG1_C220S/PVA _/S267K/S364K/E357Q

SEQ ID NO: 2435 - protein, 213 aa, synthetic construct; identical to SEQ ID NO: 150
  source 1..213: note = XENP43937 Chain 3 - 6A1[B7H3]_H1L1_Fab-6E5A7[NKG2D]_H2L1_scFv(GKPGS)4-IgG1_pI(- )_Isosteric_A_PVA_/S267K/L368D/K370S-Fc(216)_IgG1_C220S/PVA _/S267K/S364K/E357Q

SEQ ID NO: 2436 - protein, 451 aa, synthetic construct; identical to SEQ ID NO: 2340
  source 1..451: note = XENP43938 Chain 1 - 6A1[B7H3]_H1L1_Fab-6E5A7[NKG2D]_H2L1_scFv(GKPGS)4-IgG1_pI(- )_Isosteric_A_S239D/I332E/L368D/K370S-Fc(216)_IgG1_C220S/S2 39D/I332E/S364K/E357Q

SEQ ID NO: 2437 - protein, 479 aa, synthetic construct; identical to SEQ ID NO: 2431
  source 1..479: note = XENP43938 Chain 2 - 6A1[B7H3]_H1L1_Fab-6E5A7[NKG2D]_H2L1_scFv(GKPGS)4-IgG1_pI(- )_Isosteric_A_S239D/I332E/L368D/K370S-Fc(216)_IgG1_C220S/S2 39D/I332E/S364K/E357Q

SEQ ID NO: 2438 - protein, 213 aa, synthetic construct; identical to SEQ ID NO: 150
  source 1..213: note = XENP43938 Chain 3 - 6A1[B7H3]_H1L1_Fab-6E5A7[NKG2D]_H2L1_scFv(GKPGS)4-IgG1_pI(- )_Isosteric_A_S239D/I332E/L368D/K370S-Fc(216)_IgG1_C220S/S2 39D/I332E/S364K/E357Q

SEQ ID NO: 2439 - protein, 449 aa, synthetic construct; identical to SEQ ID NO: 2109
  source 1..449: note = XENP44053 Chain 1 - 2E4A3.189[B7H3]_H1.22_L1_Fab-6E5A7[NKG2D]_H2L1_scFv(GKPGS)4 -IgG1_pI(-)_Isosteric_A_L368D/K370S-Fc(216)_IgG1_C220S/S364 K/E357Q

SEQ ID NO: 2440 - protein, 479 aa, synthetic construct
  source 1..479: note = XENP44053 Chain 2 - 2E4A3.189[B7H3]_H1.22_L1_Fab-6E5A7[NKG2D]_H2L1_scFv(GKPGS)4 -IgG1_pI(-)_Isosteric_A_L368D/K370S-Fc(216)_IgG1_C220S/S364 K/E357Q
QVQLVQSGAEVKKPGASVKVSCKVSGFSLTIYGVHWVRQAPGQGLEWMGVIWSGGSTDYNAKFQGRVTMTKDNSKRTVYMELSSLRSEDTAVYYCSRKSHDGYYGVMDYWGQGTTVTVSSGKPGSGKPGSGKPGSGKPGSDIQLTQSPDFQSVTPKEKVTITCRASQSIGTSIHWYQQKPDQSPKLLIKYASESISGIPSRFSGSGSGTDFTLTINSLEAEDAATYYCQQSNTWPLTFGAGTKVEIKEPKSSDKTHTCPPCPAPELLGGPSVFLFPPKPKDTLMISRTPEVTCVVVDVSHEDPEVKFNWYVDGVEVHNAKTKPREEQYNSTYRVVSVLTVLHQDWLNGKEYKCKVSNKALPAPIEKTISKAKGQPREPQVYTLPPSREQMTKNQVKLTCLVKGFYPSDIAVEWESNGQPENNYKTTPPVLDSDGSFFLYSKLTVDKSRWQQGNVFSCSVMHEALHNHYTQKSLSLSPGK

SEQ ID NO: 2441 - protein, 214 aa, synthetic construct; identical to SEQ ID NO: 2108
  source 1..214: note = XENP44053 Chain 3 - 2E4A3.189[B7H3]_H1.22_L1_Fab-6E5A7[NKG2D]_H2L1_scFv(GKPGS)4 -IgG1_pI(-)_Isosteric_A_L368D/K370S-Fc(216)_IgG1_C220S/S364 K/E357Q

SEQ ID NO: 2442 - protein, 451 aa, synthetic construct; identical to SEQ ID NO: 1200
  source 1..451: note = XENP44054 Chain 1 - 6A1[B7H3]_H1L1_Fab-6E5A7[NKG2D]_H2L1_scFv(GKPGS)4-IgG1_pI(- )_Isosteric_A_L368D/K370S-Fc(216)_IgG1_C220S/S364K/E357Q

SEQ ID NO: 2443 - protein, 479 aa, synthetic construct; identical to SEQ ID NO: 2440
  source 1..479: note = XENP44054 Chain 2 - 6A1[B7H3]_H1L1_Fab-6E5A7[NKG2D]_H2L1_scFv(GKPGS)4-IgG1_pI(- )_Isosteric_A_L368D/K370S-Fc(216)_IgG1_C220S/S364K/E357Q

SEQ ID NO: 2444 - protein, 213 aa, synthetic construct; identical to SEQ ID NO: 150
  source 1..213: note = XENP44054 Chain 3 - 6A1[B7H3]_H1L1_Fab-6E5A7[NKG2D]_H2L1_scFv(GKPGS)4-IgG1_pI(- )_Isosteric_A_L368D/K370S-Fc(216)_IgG1_C220S/S364K/E357Q

SEQ ID NO: 2445 - protein, 452 aa, synthetic construct
  source 1..452: note = XENP44059 Chain 1 - ADI-27749_A49[NKG2D]_H0.1_L0_IgG1
EVQLVESGGGLVKPGGSLRLSCAASGFTFSSYSMNWVRQAPGKGLEWVSSISSSSSYIYYADSVKGRFTISRDNAKNSLYLQMNSLRAEDTAVYYCARGAPIGAAAGWFDPWGQGTLVTVSSASTKGPSVFPLAPSSKSTSGGTAALGCLVKDYFPEPVTVSWNSGALTSGVHTFPAVLQSSGLYSLSSVVTVPSSSLGTQTYICNVNHKPSNTKVDKKVEPKSCDKTHTCPPCPAPELLGGPSVFLFPPKPKDTLMISRTPEVTCVVVDVSHEDPEVKFNWYVDGVEVHNAKTKPREEQYNSTYRVVSVLTVLHQDWLNGKEYKCKVSNKALPAPIEKTISKAKGQPREPQVYTLPPSREEMTKNQVSLTCLVKGFYPSDIAVEWESNGQPENNYKTTPPVLDSDGSFFLYSKLTVDKSRWQQGNVFSCSVMHEALHNHYTQKSLSLSPGK

SEQ ID NO: 2446 - protein, 214 aa, synthetic construct; identical to SEQ ID NO: 176
  source 1..214: note = XENP44059 Chain 2 - ADI-27749_A49[NKG2D]_H0.1_L0_IgG1

SEQ ID NO: 2447 - protein, 451 aa, synthetic construct; identical to SEQ ID NO: 1200
  source 1..451: note = XENP44060 Chain 1 - 6A1[B7H3]_H1L1_Fab-ADI27749_A49[NKG2D]_H0.1_L0_scFv(GKPGS)4 -IgG1_pI(-)_Isosteric_A_L368D/K370S-Fc(216)_IgG1_C220S/S364 K/E357Q

SEQ ID NO: 2448 - protein, 481 aa, synthetic construct
  source 1..481: note = XENP44060 Chain 2 - 6A1[B7H3]_H1L1_Fab-ADI27749_A49[NKG2D]_H0.1_L0_scFv(GKPGS)4 -IgG1_pI(-)_Isosteric_A_L368D/K370S-Fc(216)_IgG1_C220S/S364 K/E357Q
EVQLVESGGGLVKPGGSLRLSCAASGFTFSSYSMNWVRQAPGKGLEWVSSISSSSSYIYYADSVKGRFTISRDNAKNSLYLQMNSLRAEDTAVYYCARGAPIGAAAGWFDPWGQGTLVTVSSGKPGSGKPGSGKPGSGKPGSDIQMTQSPSSVSASVGDRVTITCRASQGISSWLAWYQQKPGKAPKLLIYAASSLQSGVPSRFSGSGSGTDFTLTISSLQPEDFATYYCQQGVSFPRTFGGGTKVEIKEPKSSDKTHTCPPCPAPELLGGPSVFLFPPKPKDTLMISRTPEVTCVVVDVSHEDPEVKFNWYVDGVEVHNAKTKPREEQYNSTYRVVSVLTVLHQDWLNGKEYKCKVSNKALPAPIEKTISKAKGQPREPQVYTLPPSREQMTKNQVKLTCLVKGFYPSDIAVEWESNGQPENNYKTTPPVLDSDGSFFLYSKLTVDKSRWQQGNVFSCSVMHEALHNHYTQKSLSLSPGK

SEQ ID NO: 2449 - protein, 213 aa, synthetic construct; identical to SEQ ID NO: 150
  source 1..213: note = XENP44060 Chain 3 - 6A1[B7H3]_H1L1_Fab-ADI27749_A49[NKG2D]_H0.1_L0_scFv(GKPGS)4 -IgG1_pI(-)_Isosteric_A_L368D/K370S-Fc(216)_IgG1_C220S/S364 K/E357Q

SEQ ID NO: 2450 - protein, 451 aa, synthetic construct; identical to SEQ ID NO: 1200
  source 1..451: note = XENP44061 Chain 1 - 6A1[B7H3]_H1L1_Fab-ADI27749_A49[NKG2D]_L0_H0.1_scFv(GKPGS)4 -IgG1_pI(-)_Isosteric_A_L368D/K370S-Fc(216)_IgG1_C220S/S364 K/E357Q

SEQ ID NO: 2451 - protein, 481 aa, synthetic construct
  source 1..481: note = XENP44061 Chain 2 - 6A1[B7H3]_H1L1_Fab-ADI27749_A49[NKG2D]_L0_H0.1_scFv(GKPGS)4 -IgG1_pI(-)_Isosteric_A_L368D/K370S-Fc(216)_IgG1_C220S/S364 K/E357Q
DIQMTQSPSSVSASVGDRVTITCRASQGISSWLAWYQQKPGKAPKLLIYAASSLQSGVPSRFSGSGSGTDFTLTISSLQPEDFATYYCQQGVSFPRTFGGGTKVEIKGKPGSGKPGSGKPGSGKPGSEVQLVESGGGLVKPGGSLRLSCAASGFTFSSYSMNWVRQAPGKGLEWVSSISSSSSYIYYADSVKGRFTISRDNAKNSLYLQMNSLRAEDTAVYYCARGAPIGAAAGWFDPWGQGTLVTVSSEPKSSDKTHTCPPCPAPELLGGPSVFLFPPKPKDTLMISRTPEVTCVVVDVSHEDPEVKFNWYVDGVEVHNAKTKPREEQYNSTYRVVSVLTVLHQDWLNGKEYKCKVSNKALPAPIEKTISKAKGQPREPQVYTLPPSREQMTKNQVKLTCLVKGFYPSDIAVEWESNGQPENNYKTTPPVLDSDGSFFLYSKLTVDKSRWQQGNVFSCSVMHEALHNHYTQKSLSLSPGK

SEQ ID NO: 2452 - protein, 213 aa, synthetic construct; identical to SEQ ID NO: 150
  source 1..213: note = XENP44061 Chain 3 - 6A1[B7H3]_H1L1_Fab-ADI27749_A49[NKG2D]_L0_H0.1_scFv(GKPGS)4 -IgG1_pI(-)_Isosteric_A_L368D/K370S-Fc(216)_IgG1_C220S/S364 K/E357Q

SEQ ID NO: 2453 - protein, 232 aa, synthetic construct
  source 1..232: note = XENP44104 Chain 1 - empty_Fc-6A1[B7H3]_H1L1_Fab_(G4S)2_1D7B4[NKG2D]_H1_L1_scFv( GKPGS)4_(G4S)2-Fc(216)_IgG1_pI(-)_Isosteric_A_C220S/L368D/K 370S-Fc(222)_IgG1_S364K/E357Q
EPKSSDKTHTCPPCPAPELLGGPSVFLFPPKPKDTLMISRTPEVTCVVVDVSHEDPEVKFNWYVDGVEVHNAKTKPREEEYNSTYRVVSVLTVLHQDWLNGKEYKCKVSNKALPAPIEKTISKAKGQPREPQVYTLPPSREEMTKNQVSLTCDVSGFYPSDIAVEWESDGQPENNYKTTPPVLDSDGSFFLYSKLTVDKSRWEQGDVFSCSVMHEALHNHYTQKSLSLSPGK

SEQ ID NO: 2454 - protein, 718 aa, synthetic construct
  source 1..718: note = XENP44104 Chain 2 - empty_Fc-6A1[B7H3]_H1L1_Fab_(G4S)2_1D7B4[NKG2D]_H1_L1_scFv( GKPGS)4_(G4S)2-Fc(216)_IgG1_pI(-)_Isosteric_A_C220S/L368D/K 370S-Fc(222)_IgG1_S364K/E357Q
EVQLLESGGGLVQPGGSLRLSCAASGFTFSNYYMAWVRQAPGKGLEWVSSISTGGGSTYYRDSVKGRFTISRDNSKSTLYLQMNSLRAEDTAVYYCTTDLSAIAATPFAYWGQGTLVTVSSASTKGPSVFPLAPSSKSTSGGTAALGCLVKDYFPEPVTVSWNSGALTSGVHTFPAVLQSSGLYSLSSVVTVPSSSLGTQTYICNVNHKPSNTKVDKKVEPKSCGGGGSGGGGSEVQLLESGGGLVQPGGSLRLSCAASGFTFSSYAMSWVRQAPGKGLEWVSSISASGGSTYYADSVKGRFTISRDNSKNTLYLQMNSLRAEDTAVYYCAKGIFSIYFFYFDYWGQGTLVTVSSGKPGSGKPGSGKPGSGKPGSDIQMTQSPSSLSASVGDRVTITCRASQSISSYLNWYQQKPGKAPKLLIYAASSLQSGVPSRFSGSGSGTDFTLTISSLQPEDFATYYCQQSYSTPYTFGQGTKLEIKGGGGSGGGGSKTHTCPPCPAPELLGGPSVFLFPPKPKDTLMISRTPEVTCVVVDVSHEDPEVKFNWYVDGVEVHNAKTKPREEQYNSTYRVVSVLTVLHQDWLNGKEYKCKVSNKALPAPIEKTISKAKGQPREPQVYTLPPSREQMTKNQVKLTCLVKGFYPSDIAVEWESNGQPENNYKTTPPVLDSDGSFFLYSKLTVDKSRWQQGNVFSCSVMHEALHNHYTQKSLSLSPGK

SEQ ID NO: 2455 - protein, 213 aa, synthetic construct; identical to SEQ ID NO: 150
  source 1..213: note = XENP44104 Chain 3 - empty_Fc-6A1[B7H3]_H1L1_Fab_(G4S)2_1D7B4[NKG2D]_H1_L1_scFv( GKPGS)4_(G4S)2-Fc(216)_IgG1_pI(-)_Isosteric_A_C220S/L368D/K 370S-Fc(222)_IgG1_S364K/E357Q

SEQ ID NO: 2456 - protein, 232 aa, synthetic construct; identical to SEQ ID NO: 2453
  source 1..232: note = XENP44107 Chain 1 - empty_Fc-Numax[RSV]_H1L1_Fab_(G4S)2_1D7B4[NKG2D]_H1_L1_scFv (GKPGS)4_(G4S)2-Fc(216)_IgG1_pI(-)_Isosteric_A_C220S/L368D/ K370S-Fc(222)_IgG1_S364K/E357Q

SEQ ID NO: 2457 - protein, 717 aa, synthetic construct
  source 1..717: note = XENP44107 Chain 2 - empty_Fc-Numax[RSV]_H1L1_Fab_(G4S)2_1D7B4[NKG2D]_H1_L1_scFv (GKPGS)4_(G4S)2-Fc(216)_IgG1_pI(-)_Isosteric_A_C220S/L368D/ K370S-Fc(222)_IgG1_S364K/E357Q
QVTLRESGPALVKPTQTLTLTCTFSGFSLSTAGMSVGWIRQPPGKALEWLADIWWDDKKHYNPSLKDRLTISKDTSKNQVVLKVTNMDPADTATYYCARDMIFNFYFDVWGQGTTVTVSSASTKGPSVFPLAPSSKSTSGGTAALGCLVKDYFPEPVTVSWNSGALTSGVHTFPAVLQSSGLYSLSSVVTVPSSSLGTQTYICNVNHKPSNTKVDKKVEPKSCGGGGSGGGGSEVQLLESGGGLVQPGGSLRLSCAASGFTFSSYAMSWVRQAPGKGLEWVSSISASGGSTYYADSVKGRFTISRDNSKNTLYLQMNSLRAEDTAVYYCAKGIFSIYFFYFDYWGQGTLVTVSSGKPGSGKPGSGKPGSGKPGSDIQMTQSPSSLSASVGDRVTITCRASQSISSYLNWYQQKPGKAPKLLIYAASSLQSGVPSRFSGSGSGTDFTLTISSLQPEDFATYYCQQSYSTPYTFGQGTKLEIKGGGGSGGGGSKTHTCPPCPAPELLGGPSVFLFPPKPKDTLMISRTPEVTCVVVDVSHEDPEVKFNWYVDGVEVHNAKTKPREEQYNSTYRVVSVLTVLHQDWLNGKEYKCKVSNKALPAPIEKTISKAKGQPREPQVYTLPPSREQMTKNQVKLTCLVKGFYPSDIAVEWESNGQPENNYKTTPPVLDSDGSFFLYSKLTVDKSRWQQGNVFSCSVMHEALHNHYTQKSLSLSPGK

SEQ ID NO: 2458 - protein, 213 aa, synthetic construct; identical to SEQ ID NO: 171
  source 1..213: note = XENP44107 Chain 3 - empty_Fc-Numax[RSV]_H1L1_Fab_(G4S)2_1D7B4[NKG2D]_H1_L1_scFv (GKPGS)4_(G4S)2-Fc(216)_IgG1_pI(-)_Isosteric_A_C220S/L368D/ K370S-Fc(222)_IgG1_S364K/E357Q

SEQ ID NO: 2459 - protein, 232 aa, synthetic construct; identical to SEQ ID NO: 2453
  source 1..232: note = XENP44115 Chain 1 - empty_Fc-2E4A3.189[B7H3]_H1.22_L1_Fab_(G4S)2_1D7B4[NKG2D]_H 1_L1_scFv(GKPGS)4_(G4S)2-Fc(216)_IgG1_pI(-)_Isosteric_A_C22 0S/L368D/K370S-Fc(222)_IgG1_S364K/E357Q

SEQ ID NO: 2460 - protein, 716 aa, synthetic construct
  source 1..716: note = XENP44115 Chain 2 - empty_Fc-2E4A3.189[B7H3]_H1.22_L1_Fab_(G4S)2_1D7B4[NKG2D]_H 1_L1_scFv(GKPGS)4_(G4S)2-Fc(216)_IgG1_pI(-)_Isosteric_A_C22 0S/L368D/K370S-Fc(222)_IgG1_S364K/E357Q
QVQLVQSGAEVKKPGASVKVSCKASGYIFTNNYMHWVRQAPGQGLEWMGIISPSVGRTAYAQKFQGRVTMTRDTSTSTVYMELSSLRSEDTAVYYCARGGGSSPRLDYWGQGTLVTVSSASTKGPSVFPLAPSSKSTSGGTAALGCLVKDYFPEPVTVSWNSGALTSGVHTFPAVLQSSGLYSLSSVVTVPSSSLGTQTYICNVNHKPSNTKVDKKVEPKSCGGGGSGGGGSEVQLLESGGGLVQPGGSLRLSCAASGFTFSSYAMSWVRQAPGKGLEWVSSISASGGSTYYADSVKGRFTISRDNSKNTLYLQMNSLRAEDTAVYYCAKGIFSIYFFYFDYWGQGTLVTVSSGKPGSGKPGSGKPGSGKPGSDIQMTQSPSSLSASVGDRVTITCRASQSISSYLNWYQQKPGKAPKLLIYAASSLQSGVPSRFSGSGSGTDFTLTISSLQPEDFATYYCQQSYSTPYTFGQGTKLEIKGGGGSGGGGSKTHTCPPCPAPELLGGPSVFLFPPKPKDTLMISRTPEVTCVVVDVSHEDPEVKFNWYVDGVEVHNAKTKPREEQYNSTYRVVSVLTVLHQDWLNGKEYKCKVSNKALPAPIEKTISKAKGQPREPQVYTLPPSREQMTKNQVKLTCLVKGFYPSDIAVEWESNGQPENNYKTTPPVLDSDGSFFLYSKLTVDKSRWQQGNVFSCSVMHEALHNHYTQKSLSLSPGK

SEQ ID NO: 2461 - protein, 214 aa, synthetic construct; identical to SEQ ID NO: 2108
  source 1..214: note = XENP44115 Chain 3 - empty_Fc-2E4A3.189[B7H3]_H1.22_L1_Fab_(G4S)2_1D7B4[NKG2D]_H 1_L1_scFv(GKPGS)4_(G4S)2-Fc(216)_IgG1_pI(-)_Isosteric_A_C22 0S/L368D/K370S-Fc(222)_IgG1_S364K/E357Q

SEQ ID NO: 2462 - protein, 451 aa, synthetic construct; identical to SEQ ID NO: 1200
  source 1..451: note = XENP44480 Chain 1 - 6A1[B7H3]_H1L1_Fab-2G10A5[NKG2D]_H1L1_scFv(GKPGS)4-IgG1_pI( -)_Isosteric_A_L368D/K370S-Fc(216)_IgG1_C220S/S364K/E357Q

SEQ ID NO: 2463 - protein, 479 aa, synthetic construct
  source 1..479: note = XENP44480 Chain 2 - 6A1[B7H3]_H1L1_Fab-2G10A5[NKG2D]_H1L1_scFv(GKPGS)4-IgG1_pI( -)_Isosteric_A_L368D/K370S-Fc(216)_IgG1_C220S/S364K/E357Q
EVQLLESGGGLVQPGGSLRLSCAASGFTFSSYAMSWVRQAPGKGLEWVSGISGSGGSTYYADSVKGRFTISRDNSKNTLYLQMNSLRAEDTAVYYCAKLRPYPDAYFDYWGQGTLVTVSSGKPGSGKPGSGKPGSGKPGSDIQMTQSPSSLSASVGDRVTITCRASQSISSYLNWYQQKPGKAPKLLIYAASSLQSGVPSRFSGSGSGTDFTLTISSLQPEDFATYYCQQSSSAPITFGQGTKLEIKEPKSSDKTHTCPPCPAPELLGGPSVFLFPPKPKDTLMISRTPEVTCVVVDVSHEDPEVKFNWYVDGVEVHNAKTKPREEQYNSTYRVVSVLTVLHQDWLNGKEYKCKVSNKALPAPIEKTISKAKGQPREPQVYTLPPSREQMTKNQVKLTCLVKGFYPSDIAVEWESNGQPENNYKTTPPVLDSDGSFFLYSKLTVDKSRWQQGNVFSCSVMHEALHNHYTQKSLSLSPGK

SEQ ID NO: 2464 - protein, 213 aa, synthetic construct; identical to SEQ ID NO: 150
  source 1..213: note = XENP44480 Chain 3 - 6A1[B7H3]_H1L1_Fab-2G10A5[NKG2D]_H1L1_scFv(GKPGS)4-IgG1_pI( -)_Isosteric_A_L368D/K370S-Fc(216)_IgG1_C220S/S364K/E357Q

SEQ ID NO: 2465 - protein, 451 aa, synthetic construct; identical to SEQ ID NO: 1200
  source 1..451: note = XENP44481 Chain 1 - 6A1[B7H3]_H1L1_Fab-2G8A5[NKG2D]_H1L1_scFv(GKPGS)4-IgG1_pI(- )_Isosteric_A_L368D/K370S-Fc(216)_IgG1_C220S/S364K/E357Q

SEQ ID NO: 2466 - protein, 477 aa, synthetic construct
  source 1..477: note = XENP44481 Chain 2 - 6A1[B7H3]_H1L1_Fab-2G8A5[NKG2D]_H1L1_scFv(GKPGS)4-IgG1_pI(- )_Isosteric_A_L368D/K370S-Fc(216)_IgG1_C220S/S364K/E357Q
EVQLLESGGGLVQPGGSLRLSCAASGFTFSSYAMSWVRQAPGKGLEWVSAISSSGGSTYYADSVKGRFTISRDNSKNTLYLQMNSLRAEDTAVYYCAKVRYRVDFDYWGQGTLVTVSSGKPGSGKPGSGKPGSGKPGSDIQMTQSPSSLSASVGDRVTITCRASQSISSYLNWYQQKPGKAPKLLIYAASSLQSGVPSRFSGSGSGTDFTLTISSLQPEDFATYYCQQSYSTPPTFGQGTKLEIKEPKSSDKTHTCPPCPAPELLGGPSVFLFPPKPKDTLMISRTPEVTCVVVDVSHEDPEVKFNWYVDGVEVHNAKTKPREEQYNSTYRVVSVLTVLHQDWLNGKEYKCKVSNKALPAPIEKTISKAKGQPREPQVYTLPPSREQMTKNQVKLTCLVKGFYPSDIAVEWESNGQPENNYKTTPPVLDSDGSFFLYSKLTVDKSRWQQGNVFSCSVMHEALHNHYTQKSLSLSPGK

SEQ ID NO: 2467 - protein, 213 aa, synthetic construct; identical to SEQ ID NO: 150
  source 1..213: note = XENP44481 Chain 3 - 6A1[B7H3]_H1L1_Fab-2G8A5[NKG2D]_H1L1_scFv(GKPGS)4-IgG1_pI(- )_Isosteric_A_L368D/K370S-Fc(216)_IgG1_C220S/S364K/E357Q

SEQ ID NO: 2468 - protein, 118 aa, synthetic construct
  source 1..118: note = 5C5 - Variable heavy (vh) domain
EVQLLESGGGLVQPGGSLRLSCAASGFTFSSYAMSWVRQAPGKGLEWVSAISGSGGSTYYADSVKGRFTISRDNSKNTLYLQMNSLRAEDTAVYYCAKELYREYMDYWGQGTLVTVSS

SEQ ID NO: 2469 - protein, 109 aa, synthetic construct
  source 1..109: note = 5C5 - Variable light (vl) domain
SSELTQDPAVSVALGQTVRITCQGDSLRSYYASWYQQKPGQAPVLVIYGKNNRPSGIPDRFSGSSSGNTASLTITGAQAEDEADYYCNSRDSFSIHQNVFGGGTKLTVL

SEQ ID NO: 2470 - protein, 119 aa, synthetic construct
  source 1..119: note = 13C6 - Variable heavy (vh) domain
EVQLVQSGAEVKKPGESLKISCKGSGYSFTSYWIGWVRQMPGKGLEWMGIIYPGDSDTRYSPSFQGQVTISADKSISTAYLQWSSLKASDTAMYYCARLYPVGVYFDYWGQGTLVTVSS

SEQ ID NO: 2471 - protein, 106 aa, synthetic construct
  source 1..106: note = 13C6 - Variable light (vl) domain
DIQMTQSPSTLSASVGDRVTITCRASQSISSWLAWYQQKPGKAPKLLIYDASSLESGVPSRFSGSGSGTEFTLTISSLQPDDFATYYCQQYWSYWMFGQGTKVEIK

SEQ ID NO: 2472 - protein, 121 aa, synthetic construct
  source 1..121: note = 001 - Variable heavy (vh) domain
QQLEQSGGGLVTPGGSLKLCCIGSGFDFNTYWMTWVRQAPGKGLEWIGCIHGGSSGSTYYASWVNGRFTLSRDIDQSTGCLQVNSLTAADTAMYYCARPGYRSWSKTFDLWGQGTMVTVSS

SEQ ID NO: 2473 - protein, 107 aa, synthetic construct
  source 1..107: note = 001 - Variable light (vl) domain
DIQMTQSPSSLSASVGDRVTITCRASQDISESLNWYQQKPGKAPKLLIYAASSLQSGVPSRFSGSGSGTDYTLTISSLQPEDFATYYCQQANSFPLTFGGGTKVEIK

SEQ ID NO: 2474 - protein, 121 aa, synthetic construct
  source 1..121: note = 013 - Variable heavy (vh) domain
EQSGGGAGGGLVKPGGSLELCCKASGFDFSIYWMSWVRQSPGKGLEWIGRIYGGSSDYTAYASWVNGRFTLSRDIDQSTGCLQLNSLTAADTAMYYCVRLNPSFSRSFDYWGQGTLVTVSS

SEQ ID NO: 2475-2477 - skipped (3 entries)

SEQ ID NO: 2478 - protein, 107 aa, synthetic construct
  source 1..107: note = 013 - Variable light (vl) domain
DIQMTQSPSSVSASVGDRVTITCRASQGIFSWLVWYQQKPGKAPELLMYGASTLQSGVPSRFSGSGSGTDFTLTISSLQPEDFATYYCQQGYSTPYTFGQGTKVEIK

SEQ ID NO: 2479 - protein, 123 aa, synthetic construct
  source 1..123: note = 014 - Variable heavy (vh) domain
EVQLLESGGGLVQPGGSLRLSCAASGFTFSSYAMSWVRQAPGKGLEWVSRISDGGGTIYYTDSVKGRFTIARDNSKNTLYLEMKSLRAEDTAVYYCAKHRLYDSIGAYAMDVWGQGTTVAVSS

SEQ ID NO: 2480 - protein, 107 aa, synthetic construct
  source 1..107: note = 014 - Variable light (vl) domain
DIQMTQSPSSLSASVGDRVTITCRASQSISSYLNWYQQKPGKAPKLLIYDASNLETGVPSRFSGSGSGTDFTLTISSLQPEDFATYYCQQANSFPLTFGPGTKVDIK

SEQ ID NO: 2481 - protein, 121 aa, synthetic construct
  source 1..121: note = 018 - Variable heavy (vh) domain
QQLEQSGGGLVTPGGSLKVCCKASGFDFTTYWMTWVRQAPEKGLEWIGCIHGGDSGATYYANWVNGRFTLSRDIDQSTGCLQLNSLTAADTAMYYCARPGYPSWSKTFDLWGQGTMVTVSS

SEQ ID NO: 2482 - protein, 107 aa, synthetic construct
  source 1..107: note = 018 - Variable light (vl) domain
DIQMTQSPSSLSASVGDRVTITCQASQDISNALNWYQQKPGKAPKLLIYAASTLQSGVPSRFSGSGSGTDFTLTISSLQPEDFATYYCQHSNSFPLTFGGGTKVEIK

SEQ ID NO: 2483 - protein, 121 aa, synthetic construct
  source 1..121: note = 230 - Variable heavy (vh) domain
QQLEQSGGGLVKPGGSLELCCIASGFDFSTYWMTWVRQAPGKGLEWIGCIHGGGSGTTSYASWVNGRFTLSRDIDQSTGCLQLTSLTAADTAMYYCARPGYRSWSKTFDLWGQGTMVTVSS

SEQ ID NO: 2484 - protein, 107 aa, synthetic construct
  source 1..107: note = 230 - Variable light (vl) domain
DIQMTQSPSSLSASVGDRVTITCQANQDISNALNWYQQKPGKAPKLLIYAASSLQSGVPSRFSGSGSGTDFTLTISSLQPEDFAAYYCQQAASFPLTFGGGTKVEIK

SEQ ID NO: 2485 - protein, 121 aa, synthetic construct
  source 1..121: note = 296 - Variable heavy (vh) domain
EVQLLESGGGLVQPGGSLRLSCAASGFTFSSYAMSWVRQAPGKGLEWVSAIGIGGGGTYYADSVKGRFTISRDNSKNTLYLQMNSLRAEDTAVYHCAKGASFDFINFFPYWGQGTLVTVSS

SEQ ID NO: 2486 - protein, 107 aa, synthetic construct
  source 1..107: note = 296 - Variable light (vl) domain
DIQMTQSPSSLSASVGDRVTITCRASQGISNDLAWYQQKPGKAPKLLIYAASSLQSGVPSRFSGSGSGTDFTLTISSLQPEDFATYYCQQTYSTPLTFGGGTKVEIK

SEQ ID NO: 2487 - protein, 121 aa, synthetic construct
  source 1..121: note = 320 - Variable heavy (vh) domain
EVQLLESGGGLVQPGGSLRLSCATSGFTFSDYAMSWVRQAPGKGLEWVSYNSFSVGSTDYADSVKGRFTISRDNSKNTLYLQMNSLRAEDTAVYYCSKHSGNYYTGPFHYWGQGTLVTVSS

SEQ ID NO: 2488 - protein, 107 aa, synthetic construct
  source 1..107: note = 320 - Variable light (vl) domain
DIQLTQSPSFLSASVGDRVTITCRASQGISSYLAWYQQKPGKAPKLLIYAASSLESGVPSRFSGSGSGTDFTLTISSLQPEDFATYYCQQSYSTPITFGQGTRLEIK

SEQ ID NO: 2489 - protein, 121 aa, synthetic construct
  source 1..121: note = 395 - Variable heavy (vh) domain
QEQLEQSGGGLVTPGGSLKLCCTASGFDFNTFWMTWVRQAPGKGLEWIGCIHGGSGSRDYASWVNGRFTLSRDIDQSTACLQVNSLTAADTAMYYCARPGYRSWSKTFDLWGQGTMVTVSS

SEQ ID NO: 2490 - protein, 107 aa, synthetic construct
  source 1..107: note = 395 - Variable light (vl) domain
DIQMTQSPSSLSASVGDRVTITCRASQDISGALNWYQQKPGKAPNLLIYAASSLQSGVPSRFSGSGSGTDYTLTISSLQPEDFATYYCQQANSFPLTFGGGTKVEIK

SEQ ID NO: 2491 - protein, 121 aa, synthetic construct
  source 1..121: note = P1A34972 - Variable heavy (vh) domain
QEQLEQSGGGLVTPGGSLKLCCTASGFDFNTFWMTWVRQAPGKGLEWIGSIHGGSGSRDYASWVNGRFTLSRDIDQSTACLQVNSLTAADTAMYYCARPGYRSWSKTFDLWGQGTMVTVSS

SEQ ID NO: 2492 - protein, 107 aa, synthetic construct; identical to SEQ ID NO: 2490
  source 1..107: note = P1A34972 - Variable light (vl) domain

SEQ ID NO: 2493 - protein, 121 aa, synthetic construct
  source 1..121: note = P1AE4973 - Variable heavy (vh) domain
EVQLLESGGGLVQPGGSLRLSCAASGFDFNTFWMTWVRQAPGKGLEWVGSIHGGSGSRDYADSVKGRFTISRDNSKNTLYLQMNSLRAEDTAVYYCARPGYRSWSKTFDLWGQGTTVTVSS

SEQ ID NO: 2494 - protein, 107 aa, synthetic construct; identical to SEQ ID NO: 2490
  source 1..107: note = P1AE4973 - Variable light (vl) domain

SEQ ID NO: 2495 - protein, 121 aa, synthetic construct
  source 1..121: note = P1A34975 - Variable heavy (vh) domain
EVQLLESGGGLVQPGGSLRLSCAASGFDFNTFWMTWVRQAPGKGLEWVGSIHGGSGSRDYADSVKGRFTISRDNSKNTAYLQMNSLRAEDTAVYYCARPGYRSWSKTFDLWGQGTTVTVSS

SEQ ID NO: 2496 - protein, 107 aa, synthetic construct; identical to SEQ ID NO: 2490
  source 1..107: note = P1A34975 - Variable light (vl) domain

SEQ ID NO: 2497 - protein, 121 aa, synthetic construct
  source 1..121: note = P1AE4977 - Variable heavy (vh) domain
EVQLLESGGGLVQPGGSLRLSCAASGFDFNTFWMTWVRQAPGKGLEWVGSIHGGSGSRDYADSVKGRFTISRDIDQSTAYLQMNSLRAEDTAVYYCARPGYRSWSKTFDLWGQGTTVTVSS

SEQ ID NO: 2498 - protein, 107 aa, synthetic construct; identical to SEQ ID NO: 2490
  source 1..107: note = P1AE4977 - Variable light (vl) domain

SEQ ID NO: 2499 - protein, 121 aa, synthetic construct
  source 1..121: note = P1AE4978 - Variable heavy (vh) domain
EVQLVESGGGLVQPGGSLRLSCAASGFDFNTFWMTWVRQAPGKGLEWVGSIHGGSGSRDYADSVKGRFTISADIDQSTAYLQMNSLRAEDTAVYYCARPGYRSWSKTFDLWGQGTTVTVSS

SEQ ID NO: 2500 - protein, 107 aa, synthetic construct; identical to SEQ ID NO: 2490
  source 1..107: note = P1AE4978 - Variable light (vl) domain

SEQ ID NO: 2501 - protein, 121 aa, synthetic construct
  source 1..121: note = P1AE4979 - Variable heavy (vh) domain
QEQLLESGGGLVQPGGSLRLSCAASGFDFNTFWMTWVRQAPGKGLEWVGSIHGGSGSRDYADSVKGRFTISRDIDQSTAYLQMNSLRAEDTAVYYCARPGYRSWSKTFDLWGQGTTVTVSS

SEQ ID NO: 2502 - protein, 107 aa, synthetic construct; identical to SEQ ID NO: 2490
  source 1..107: note = P1AE4979 - Variable light (vl) domain

SEQ ID NO: 2503 - protein, 121 aa, synthetic construct
  source 1..121: note = P1AE4980 - Variable heavy (vh) domain
QEQLVQSGAEVKKPGESLKISCKGSGFDFNTFWMTWVRQMPGKGLEWMGSIHGGSGSRDYSPSFQGQVTISADIDQSTAYLQWSSLKASDTAMYYCARPGYRSWSKTFDLWGQGTTVTVSS

SEQ ID NO: 2504 - protein, 107 aa, synthetic construct; identical to SEQ ID NO: 2490
  source 1..107: note = P1AE4980 - Variable light (vl) domain

SEQ ID NO: 2505 - protein, 121 aa, synthetic construct
  source 1..121: note = P1AE4981 - Variable heavy (vh) domain
QEQLQESGPGLVKPSETLSLTCTVSGFDFNTFWMTWIRQPPGKGLEWIGSIHGGSGSRDYNPSLKSRVTISVDIDQNQFSLKLSSVTAADTAVYYCARPGYRSWSKTFDLWGQGTTVTVSS

SEQ ID NO: 2506 - protein, 107 aa, synthetic construct; identical to SEQ ID NO: 2490
  source 1..107: note = P1AE4981 - Variable light (vl) domain

SEQ ID NO: 2507 - protein, 117 aa, synthetic construct
  source 1..117: note = ADI-27705 - Variable heavy (vh) domain
QVQLQQWGAGLLKPSETLSLTCAVYGGSFSGYYWSWIRQPPGKGLEWIGEIDHSGSTNYNPSLKSRVTISVDTSKNQFSLKLSSVTAADTAVYYCARARGPWSFDPWGQGTLVTVSS

SEQ ID NO: 2508 - protein, 107 aa, synthetic construct
  source 1..107: note = ADI-27705 - Variable light (vl) domain
DIQMTQSPSTLSASVGDRVTITCRASQSISSWLAWYQQKPGKAPKLLIYKASSLESGVPSRFSGSGSGTEFTLTISSLQPDDFATYYCQQYNSYPITFGGGTKVEIK

SEQ ID NO: 2509 - protein, 117 aa, synthetic construct; identical to SEQ ID NO: 2507
  source 1..117: note = ADI-27724 - Variable heavy (vh) domain

SEQ ID NO: 2510 - protein, 108 aa, synthetic construct
  source 1..108: note = ADI-27724 - Variable light (vl) domain
EIVLTQSPGTLSLSPGERATLSCRASQSVSSSYLAWYQQKPGQAPRLLIYGASSRATGIPDRFSGSGSGTDFTLTISRLEPEDFAVYYCQQYGSSPITFGGGTKVEIK

SEQ ID NO: 2511 - protein, 117 aa, synthetic construct; identical to SEQ ID NO: 2507
  source 1..117: note = ADI-27740 - Variable heavy (vh) domain

SEQ ID NO: 2512 - protein, 106 aa, synthetic construct
  source 1..106: note = ADI-27740 - Variable light (vl) domain
DIQMTQSPSTLSASVGDRVTITCRASQSIGSWLAWYQQKPGKAPKLLIYKASSLESGVPSRFSGSGSGTEFTLTISSLQPDDFATYYCQQYHSFYTFGGGTKVEIK

SEQ ID NO: 2513 - protein, 117 aa, synthetic construct; identical to SEQ ID NO: 2507
  source 1..117: note = ADI-22741 - Variable heavy (vh) domain

SEQ ID NO: 2514 - protein, 106 aa, synthetic construct
  source 1..106: note = ADI-22741 - Variable light (vl) domain
DIQMTQSPSTLSASVGDRVTITCRASQSIGSWLAWYQQKPGKAPKLLIYKASSLESGVPSRFSGSGSGTEFTLTISSLQPDDFATYYCQQSNSYYTFGGGTKVEIK

SEQ ID NO: 2515 - protein, 117 aa, synthetic construct; identical to SEQ ID NO: 2507
  source 1..117: note = ADI-27743 - Variable heavy (vh) domain

SEQ ID NO: 2516 - protein, 106 aa, synthetic construct
  source 1..106: note = ADI-27743 - Variable light (vl) domain
DIQMTQSPSTLSASVGDRVTITCRASQSISSWLAWYQQKPGKAPKLLIYKASSLESGVPSRFSGSGSGTEFTLTISSLQPDDFATYYCQQYNSYPTFGGGTKVEIK

SEQ ID NO: 2517 - protein, 117 aa, synthetic construct
  source 1..117: note = ADI-28153 - Variable heavy (vh) domain
QVQLQQWGAGLLKPSETLSLTCAVYGGSFSGYYWSWIRQPPGKGLEWIGEIDHSGSTNYNPSLKSRVTISVDTSKNQFSLKLSSVTAADTAVYYCARARGPWGFDPWGQGTLVTVSS

SEQ ID NO: 2518 - protein, 107 aa, synthetic construct
  source 1..107: note = ADI-28153 - Variable light (vl) domain
ELQMTQSPSSLSASVGDRVTITCRTSQSISSYLNWYQQKPGQPPKLLIYWASTRESGVPDRFSGSGSGTDFTLTISSLQPEDSATYYCQQSYDIPYTFGQGTKLEIK

SEQ ID NO: 2519 - protein, 117 aa, synthetic construct; identical to SEQ ID NO: 2507
  source 1..117: note = ADI-28226 - Variable heavy (vh) domain

SEQ ID NO: 2520 - protein, 107 aa, synthetic construct
  source 1..107: note = ADI-28226 - Variable light (vl) domain
DIQMTQSPSTLSASVGDRVTITCRASQSISSWLAWYQQKPGKAPKLLIYKASSLESGVPSRFSGSGSGTEFTLTISSLQPDDFATYYCQQYGSFPITFGGGTKVEIK

SEQ ID NO: 2521 - protein, 117 aa, synthetic construct; identical to SEQ ID NO: 2507
  source 1..117: note = ADI-28154 - Variable heavy (vh) domain

SEQ ID NO: 2522 - protein, 107 aa, synthetic construct
  source 1..107: note = ADI-28154 - Variable light (vl) domain
DIQMTQSPSTLSASVGDRVTITCRASQSISSWLAWYQQKPGKAPKLLIYKASSLESGVPSRFSGSGSGTDFTLTISSLQPDDFATYYCQQSKEVPWTFGQGTKVEIK

SEQ ID NO: 2523 - protein, 117 aa, synthetic construct; identical to SEQ ID NO: 2507
  source 1..117: note = ADI-29399 - Variable heavy (vh) domain

SEQ ID NO: 2524 - protein, 106 aa, synthetic construct
  source 1..106: note = ADI-29399 - Variable light (vl) domain
DIQMTQSPSTLSASVGDRVTITCRASQSISSWLAWYQQKPGKAPKLLIYKASSLESGVPSRFSGSGSGTEFTLTISSLQPDDFATYYCQQYNSFPTFGGGTKVEIK

SEQ ID NO: 2525 - protein, 117 aa, synthetic construct; identical to SEQ ID NO: 2507
  source 1..117: note = ADI-29401 - Variable heavy (vh) domain

SEQ ID NO: 2526 - protein, 106 aa, synthetic construct
  source 1..106: note = ADI-29401 - Variable light (vl) domain
DIQMTQSPSTLSASVGDRVTITCRASQSIGSWLAWYQQKPGKAPKLLIYKASSLESGVPSRFSGSGSGTEFTLTISSLQPDDFATYYCQQYDIYPTFGGGTKVEIK

SEQ ID NO: 2527 - protein, 117 aa, synthetic construct; identical to SEQ ID NO: 2507
  source 1..117: note = ADI-29403 - Variable heavy (vh) domain

SEQ ID NO: 2528 - protein, 106 aa, synthetic construct
  source 1..106: note = ADI-29403 - Variable light (vl) domain
DIQMTQSPSTLSASVGDRVTITCRASQSISSWLAWYQQKPGKAPKLLIYKASSLESGVPSRFSGSGSGTEFTLTISSLQPDDFATYYCQQYDSYPTFGGGTKVEIK

SEQ ID NO: 2529 - protein, 117 aa, synthetic construct; identical to SEQ ID NO: 2507
  source 1..117: note = ADI-29405 - Variable heavy (vh) domain

SEQ ID NO: 2530 - protein, 106 aa, synthetic construct
  source 1..106: note = ADI-29405 - Variable light (vl) domain
DIQMTQSPSTLSASVGDRVTITCRASQSISSWLAWYQQKPGKAPKLLIYKASSLESGVPSRFSGSGSGTEFTLTISSLQPDDFATYYCQQYGSFPTFGGGTKVEIK

SEQ ID NO: 2531 - protein, 117 aa, synthetic construct; identical to SEQ ID NO: 2507
  source 1..117: note = ADI-29407 - Variable heavy (vh) domain

SEQ ID NO: 2532 - protein, 106 aa, synthetic construct
  source 1..106: note = ADI-29407 - Variable light (vl) domain
DIQMTQSPSTLSASVGDRVTITCRASQSISSWLAWYQQKPGKAPKLLIYKASSLESGVPSRFSGSGSGTEFTLTISSLQPDDFATYYCQQYQSFPTFGGGTKVEIK

SEQ ID NO: 2533 - protein, 117 aa, synthetic construct; identical to SEQ ID NO: 2507
  source 1..117: note = ADI-29419 - Variable heavy (vh) domain

SEQ ID NO: 2534 - protein, 106 aa, synthetic construct
  source 1..106: note = ADI-29419 - Variable light (vl) domain
DIQMTQSPSTLSASVGDRVTITCRASQSISSWLAWYQQKPGKAPKLLIYKASSLESGVPSRFSGSGSGTEFTLTISSLQPDDFATYYCQQYSSFSTFGGGTKVEIK

SEQ ID NO: 2535 - protein, 117 aa, synthetic construct; identical to SEQ ID NO: 2507
  source 1..117: note = ADI-29421 - Variable heavy (vh) domain

SEQ ID NO: 2536 - protein, 106 aa, synthetic construct
  source 1..106: note = ADI-29421 - Variable light (vl) domain
DIQMTQSPSTLSASVGDRVTITCRASQSISSWLAWYQQKPGKAPKLLIYKASSLESGVPSRFSGSGSGTEFTLTISSLQPDDFATYYCQQYESYSTFGGGTKVEIK

SEQ ID NO: 2537 - protein, 117 aa, synthetic construct; identical to SEQ ID NO: 2507
  source 1..117: note = ADI-29424 - Variable heavy (vh) domain

SEQ ID NO: 2538 - protein, 106 aa, synthetic construct
  source 1..106: note = ADI-29424 - Variable light (vl) domain
DIQMTQSPSTLSASVGDRVTITCRASQSISSWLAWYQQKPGKAPKLLIYKASSLESGVPSRFSGSGSGTEFTLTISSLQPDDFATYYCQQYDSFITFGGGTKVEIK

SEQ ID NO: 2539 - protein, 117 aa, synthetic construct; identical to SEQ ID NO: 2507
  source 1..117: note = ADI-29425 - Variable heavy (vh) domain

SEQ ID NO: 2540 - protein, 106 aa, synthetic construct
  source 1..106: note = ADI-29425 - Variable light (vl) domain
DIQMTQSPSTLSASVGDRVTITCRASQSISSWLAWYQQKPGKAPKLLIYKASSLESGVPSRFSGSGSGTEFTLTISSLQPDDFATYYCQQYQSYPTFGGGTKVEIK

SEQ ID NO: 2541 - protein, 117 aa, synthetic construct; identical to SEQ ID NO: 2507
  source 1..117: note = ADI-29426 - Variable heavy (vh) domain

SEQ ID NO: 2542 - protein, 106 aa, synthetic construct
  source 1..106: note = ADI-29426 - Variable light (vl) domain
DIQMTQSPSTLSASVGDRVTITCRASQSIGSWLAWYQQKPGKAPKLLIYKASSLESGVPSRFSGSGSGTEFTLTISSLQPDDFATYYCQQYHSFPTFGGGTKVEIK

SEQ ID NO: 2543 - protein, 117 aa, synthetic construct; identical to SEQ ID NO: 2507
  source 1..117: note = ADI-29429 - Variable heavy (vh) domain

SEQ ID NO: 2544 - protein, 107 aa, synthetic construct
  source 1..107: note = ADI-29429 - Variable light (vl) domain
DIQMTQSPSTLSASVGDRVTITCRASQSIGSWLAWYQQKPGKAPKLLIYKASSLESGVPSRFSGSGSGTEFTLTISSLQPDDFATYYCQQYELYSYTFGGGTKVEIK

SEQ ID NO: 2545 - protein, 117 aa, synthetic construct; identical to SEQ ID NO: 2507
  source 1..117: note = ADI-29447 - Variable heavy (vh) domain

SEQ ID NO: 2546 - protein, 106 aa, synthetic construct
  source 1..106: note = ADI-29447 - Variable light (vl) domain
DIQMTQSPSTLSASVGDRVTITCRASQSISSWLAWYQQKPGKAPKLLIYKASSLESGVPSRFSGSGSGTEFTLTISSLQPDDFATYYCQQYDTFITFGGGTKVEIK

SEQ ID NO: 2547 - protein, 117 aa, synthetic construct; identical to SEQ ID NO: 2507
  source 1..117: note = ADI-29404 - Variable heavy (vh) domain

SEQ ID NO: 2548 - protein, 106 aa, synthetic construct
  source 1..106: note = ADI-29404 - Variable light (vl) domain
DIQMTQSPSTLSASVGDRVTITCRASQSISSWLAWYQQKPGKAPKLLIYKASSLESGVPSRFSGSGSGTEFTLTISSLQPDDFATYYCEQYDSYPTFGGGTKVEIK

SEQ ID NO: 2549 - protein, 126 aa, synthetic construct
  source 1..126: note = ADI-28200 - Variable heavy (vh) domain
QVQLVQSGAEVKKPGSSVKVSCKASGGTFSSYAISWVRQAPGQGLEWMGGIIPIFGTANYAQKFQGRVTITADESTSTAYMELSSLRSEDTAVYYCARRGRKASGSFYYYYGMDVWGQGTTVTVSS

SEQ ID NO: 2550 - protein, 113 aa, synthetic construct [sequence omitted]

SEQ ID NO: 2551 - protein, 93 aa, synthetic construct
  source 1..93: note = ET1F08 - Variable heavy (vh) domain
MAQVQLVQSGGGLVQAGGSLRLSCAASMAWFRQAPGKEREFVALYYADSVKGRFTIARDNAKNTVDLQMNSLKPEDTAVYYCWGQGTQVTVSS

SEQ ID NO: 2552 - protein, 93 aa, synthetic construct
  source 1..93: note = ET2F09 - Variable heavy (vh) domain
MAQVQLVQSGGGLVQPGGSLRLSCAASMSWVRQAPGKGLEWVSAYYAESMKGRFTTSRDNAKNTLYLQMNSLKPEDTALYYCWGQGTQVTVSS

SEQ ID NO: 2553 - protein, 121 aa, synthetic construct
  source 1..121: note = mAb E - Variable heavy (vh) domain
EVQLVESGGGLVKPGGSLRLSCAASGFTFSSYSMNWVRQAPGKGLEWVSSITSSSSYIYYADSVKGRFTISRDNAKNSLYLQMNSLRAEDTAVYYCARDRRYFDWFPLDYRGQGTLVTVSS

SEQ ID NO: 2554 - protein, 108 aa, synthetic construct
  source 1..108: note = mAb E - Variable light (vl) domain
DIQMTQSPSSLSASVGDRVTITCRASQGISSWLAWYQQKPEKAPKSLIYAASSLQSGVPSRFSGSGSGTDFTLTISSLQPEDFATYYCQQYNGYPYTFGQGTKLEIKR

SEQ ID NO: 2555 - protein, 115 aa, synthetic construct
  source 1..115: note = MS - Variable heavy (vh) domain
QVHLQESGPGLVKPSETLSLTCTVSDDSISSYYWSWIRQPPGKGLEWIGHISYSGSANYNPSLKSRVTISVDTSKNQFSLKLSSVTAADTAVYYCANWDDAFNIWGQGTMVTVSS

SEQ ID NO: 2556 - protein, 108 aa, synthetic construct
  source 1..108: note = MS - Variable light (vl) domain
EIVLTQSPGTLSLSPGERATLSCRASQSVSSSYLAWYQQKPGQAPRLLIYGASSRATGIPDRFSGSGSGTDFTLTISRLEPEDFAVYYCQQYGSSPWTFGQGTKVEIK

SEQ ID NO: 2557 - protein, 123 aa, synthetic construct
  source 1..123: note = 21F2 - Variable heavy (vh) domain
EVQLVQSGAEVKEPGESLKISCKNSGYSFTNYWVGWVRQMPGKGLEWMGIIYPGDSDTRYSPSFQGQVTISADKSINTAYLQWSSLKASDTAMYYCGRLTMFRGIIIGYFDYWGQGTLVTVSS

SEQ ID NO: 2558 - protein, 107 aa, synthetic construct
  source 1..107: note = 21F2 - Variable light (vl) domain
EIVLTQSPATLSLSPGERATLSCRASQSVSSYLAWYQQKPGQAPRLLIYDASNRATGIPARFSGSGSGTDFTLTISSLEPEDFAVYYCQQRSNWPWTFGQGTKVEIK

SEQ ID NO: 2559 - protein, 122 aa, synthetic construct
  source 1..122: note = 16F31 - Variable heavy (vh) domain
EVQLVESGGGVVRPGGSLRLSCAASGFTFDDYGMTWVRQAPGKGLEWVSGINWNGGSTGYADSVKGRFTISRDNAKNSLYLQMNSLRAEDTALYYCARERELYYYYYGLDVWGQGTTVTVSS

SEQ ID NO: 2560 - protein, 109 aa, synthetic construct
  source 1..109: note = 16F31 - Variable light (vl) domain
EIVLTQSPGTLSLSPGERATLSCRASQSVSSSYLAWYQQKPGQAPRLLIYGASSRATGIPDRFSGSGSGTDFTLTISRLEPEDFAVYYCQQYGSSPFTFGPGTKVDIKR

SEQ ID NO: 2561 - protein, 121 aa, synthetic construct
  source 1..121: note = KYK-2.0 - Variable heavy (vh) domain
QVQLVESGGGLVKPGGSLRLSCAASGFTFSSYGMHWVRQAPGKGLEWVAFIRYDGSNKYYADSVKGRFTISRDNSKNTLYLQMNSLRAEDTAVYYCAKDRGLGDGTYFDYWGQGTTVTVSS

SEQ ID NO: 2562 - protein, 110 aa, synthetic construct
  source 1..110: note = KYK-2.0 - Variable light (vl) domain
QSALTQPASVSGSPGQSITISCSGSSSNIGNNAVNWYQQLPGKAPKLLIYYDDLLPSGVSDRFSGSKSGTSAFLAISGLQSEDEADYYCAAWDDSLNGPVFGGGTKLTVL

SEQ ID NO: 2563 - protein, 121 aa, synthetic construct; identical to SEQ ID NO: 50
  source 1..121: note = 1D7B4 - Variable heavy (vh) domain

SEQ ID NO: 2564 - protein, 107 aa, synthetic construct; identical to SEQ ID NO: 51
  source 1..107: note = 1D7B4 - Variable light (vl) domain

SEQ ID NO: 2565 - protein, 118 aa, synthetic construct
  source 1..118: note = KYK-1.0 - Variable heavy (vh) domain
EVQLVESGGGVVQPGGSLRLSCAASGFTFSSYGMHWVRQAPGKGLEWVAFIRYDGSNKYYADSVKGRFTISRDNSKNTKYLQMNSLRAEDTAVYYCAKDRFGYYLDYWGQGTLVTVSS

SEQ ID NO: 2566 - protein, 108 aa, synthetic construct
  source 1..108: note = KYK-1.0 - Variable light (vl) domain
QPVLTQPSSVSVAPGETARIPCGGDDIETKSVHWYQQKPGQAPVLVIYDDDDRPSGIPERFFGSNSGNTATLSISRVEAGDEADYYCQVWDDNNDEWVFGGGTQLTVL

SEQ ID NO: 2567 - protein, 117 aa, synthetic construct
  source 1..117: note = 11B2D10 - Variable heavy (vh) domain
QVQLQQSGPELVRPGASVKLSCKASGYTFTSYWMNWVQQRPEQGLEWIGRIDPYDSETHYNQKFKDKAILTVDKSASTAYMQLSSLTSEDSAVYYCAKMGDYSFDYWGQGTTVTVSS

SEQ ID NO: 2568 - protein, 107 aa, synthetic construct
  source 1..107: note = 11B2D10 - Variable light (vl) domain
DIQLTQSPASLSASVGETVTITCRASGNIHNYLAWYQQKQGKSPQVLVYNAKTLADGVPSRFSGSGSGTQYSLKINSLQPEDFGSYYCQHFWSTTWTFGGGTKLEIK

SEQ ID NO: 2569 - protein, 120 aa, synthetic construct
  source 1..120: note = 6E5A7 - Variable heavy (vh) domain
QVQLQQSGPGLVQPSQSLSITCTVSGFSLTIYGVHWVRQSPGKGLEWLGVIWSGGSTDYNAAFISRLSISKDNSKRQVFFKMSSLQANDTAIYYCSRKSHDGYYGVMDYWGQGTTVTVSS

SEQ ID NO: 2570 - protein, 107 aa, synthetic construct
  source 1..107: note = 6E5A7 - Variable light (vl) domain
DIQLTQSPAILSVSPGERVSFSCRASQSIGTSIHWYQQRTNGSPRLLIKYASESISGIPSRFSGSGSGTDFTLSINGVESEDIADYYCQQSNTWPLTFGAGTKLEIK

SEQ ID NO: 2571 - protein, 119 aa, synthetic construct
  source 1..119: note = 6H7E7 - Variable heavy (vh) domain
QVQLQESGPGLVAPSQSLSITCTVSGFSLTSYGVHWIRQPPGKGLEWLGVIWAGGSTNYNSALMSRLSISKDNSKSQVFLKMNSLQIDDTAMYYCARGGYEGAAWFGYWGQGTTVTVSS

SEQ ID NO: 2572 - protein, 106 aa, synthetic construct
  source 1..106: note = 6H7E7 - Variable light (vl) domain
DIQLTQSPAILSASPGEKVTMTCRASSSVSYMHWYQQKPGSSPKPWIYATSNLASGVPARFSGSGSGTSYSLTISRVEAEDAATYYCQQWNSNPLTFGAGTKLEIK

SEQ ID NO: 2573 - protein, 122 aa, synthetic construct
  source 1..122: note = mAb D - Variable heavy (vh) domain
QVQLVQSGAEVKKPGASVKVSCKASGYTFTNYWMHWVRQAPGQGLEWMGEIDPSDIYTNYAQKFQGRVTMTRDTSTSTVYMELSSLRSEDTAVYYCARGIYDGYYVYGMDYWGQGTTVTVSS

SEQ ID NO: 2574 - protein, 107 aa, synthetic construct
  source 1..107: note = mAb D - Variable light (vl) domain
YIQMTQSPSSLSASVGDRVTITCRSSQDISNYLNWYQQKPGKAPKLLIYYTSRLHSGVPSRFSGSGSGTDFTFTISSLQPEDIATYYCQQGKTLPRTFGGGTKVEIK

SEQ ID NO: 2575 - protein, 119 aa, synthetic construct
  source 1..119: note = mAb A_H1 - Variable heavy (vh) domain
QVQLVQSGAEVKKPGASVKVSCKVSGFSLTSYGVHWIRQAPGQGLEWMGVIWAGGSTNYNSKFQGRVTMTKDNSKSTVYMELSSLRSEDTAVYYCARGGYEGAAWFGYWGQGTLVTVSS

SEQ ID NO: 2576 - protein, 106 aa, synthetic construct
  source 1..106: note = mAb A_L1 - Variable light (vl) domain
DIQLTQSPSSLSASVGDRVTITCRASSSVSYMHWYQQKPGKSPKPLIYATSNLASGVPARFSGSGSGTDYTLTISSLQPEDFATYYCQQWNSNPLTFGAGTKVEIK

SEQ ID NO: 2577 - protein, 119 aa, synthetic construct
  source 1..119: note = mAb A_H2 - Variable heavy (vh) domain
QVQLQESGPGLVKPSETLSLTCTVSGFSLTSYGVHWIRQPPGKGLEWIGVIWAGGSTNYNPSLKSRVTISKDNSKSQVSLKLSSVTAADTAVYYCARGGYEGAAWFGYWGQGTLVTVSS

SEQ ID NO: 2578 - protein, 106 aa, synthetic construct
  source 1..106: note = mAb A_L2 - Variable light (vl) domain
DIQLTQSPATLSLSPGERATLSCRASSSVSYMHWYQQKPGQSPRPLIYATSNLASGVPARFSGSGSGTDYTLTISSLEPEDFAVYYCQQWNSNPLTFGAGTKVEIK

SEQ ID NO: 2579 - protein, 117 aa, synthetic construct
  source 1..117: note = mAb B_H1 - Variable heavy (vh) domain
QVQLVQSGAEVKKPGASVKVSCKASGYTFTSYWMNWVRQAPGQGLEWMGRIDPYDSETHYNQKFQGRVTMTVDKSTSTAYMELSSLRSEDTAVYYCAKMGDYSFDYWGQGTLVTVSS

SEQ ID NO: 2580 - protein, 117 aa, synthetic construct
  source 1..117: note = mAb B_H2 - Variable heavy (vh) domain
EVQLVQSGAEVKKPGESLRISCKASGYTFTSYWMNWVRQMPGKGLEWMGRIDPYDSETHYNPSFQGHVTISVDKSISTAYLQWSSLKASDTAMYYCAKMGDYSFDYWGQGTLVTVSS

SEQ ID NO: 2581 - protein, 117 aa, synthetic construct
  source 1..117: note = mAb B_H3 - Variable heavy (vh) domain
EVQLVESGGGLVQPGGSLRLSCAASGYTFTSYWMNWVRQAPGKGLVWVSRIDPYDSETHYNQKVKGRFTISVDKAKSTAYLQMNSLRAEDTAVYYCAKMGDYSFDYWGQGTLVTVSS

SEQ ID NO: 2582 - protein, 107 aa, synthetic construct
  source 1..107: note = mAb B_L1 - Variable light (vl) domain
DIQLTQSPSSLSASVGDRVTITCRASGNIHNYLAWYQQKPGKSPKVLVYNAKTLADGVPSRFSGSGSGTDYTLTISSLQPEDFATYYCQHFWSTTWTFGGGTKVEIK

SEQ ID NO: 2583 - protein, 107 aa, synthetic construct
  source 1..107: note = mAb B_L1.1 - Variable light (vl) domain
DIQLTQSPSSLSASVGDRVTITCRASGNIHNYLAWYQQKPGKSPKVLVYNAKTLADGVPSRFSGSGSGTDYTLTISSLQPEDFATYYCQHFWSTPWTFGGGTKVEIK

SEQ ID NO: 2584 - protein, 107 aa, synthetic construct
  source 1..107: note = mAb B_L2 - Variable light (vl) domain
DIQLTQSPDSLAVSLGERATINCKASGNIHNYLAWYQQKPGQSPKVLVYNAKTLADGVPSRFSGSGSGTDYTLTISSLQAEDVAVYYCQHFWSTTWTFGGGTKVEIK

SEQ ID NO: 2585 - protein, 120 aa, synthetic construct
  source 1..120: note = mAb C_H1 - Variable heavy (vh) domain
EVQLVESGGGLVQPGGSLRLSCAVSGFSLTIYGVHWVRQAPGKGLEWVSVIWSGGSTDYNAKVKGRFTISKDNSKRTVYLQMNSLRAEDTAVYYCSRKSHDGYYGVMDYWGQGTTVTVSS

SEQ ID NO: 2586 - protein, 120 aa, synthetic construct
  source 1..120: note = mAb C_H2 - Variable heavy (vh) domain
QVQLVQSGAEVKKPGASVKVSCKVSGFSLTIYGVHWVRQAPGQGLEWMGVIWSGGSTDYNAKFQGRVTMTKDNSKRTVYMELSSLRSEDTAVYYCSRKSHDGYYGVMDYWGQGTTVTVSS

SEQ ID NO: 2587 - protein, 107 aa, synthetic construct
  source 1..107: note = mAb C_L1 - Variable light (vl) domain
DIQLTQSPDFQSVTPKEKVTITCRASQSIGTSIHWYQQKPDQSPKLLIKYASESISGIPSRFSGSGSGTDFTLTINSLEAEDAATYYCQQSNTWPLTFGAGTKVEIK

SEQ ID NO: 2588 - protein, 107 aa, synthetic construct
  source 1..107: note = mAb C_L2 - Variable light (vl) domain
DIQLTQSPSSLSASVGDRVTITCRASQSIGTSIHWYQQKPGKSPKLLIKYASESISGIPSRFSGSGSGTDFTLTISSLQPEDFATYYCQQSNTWPLTFGAGTKVEIK

SEQ ID NO: 2589 - protein, 125 aa, synthetic construct
  source 1..125: note = ADI-27727 - Variable heavy (vh) domain
QVQLVQSGAEVKKPGSSVKVSCKASGGTFSSYAISWVRQAPGQGLEWMGGIIPIFGTANYAQKFQGRVTITADESTSTAYMELSSLRSEDTAVYYCARGDSSIRHAYYYYGMDVWGQGTTVTVSS

SEQ ID NO: 2590 - protein, 113 aa, synthetic construct
  source 1..113: note = ADI-27727 - Variable light (vl) domain
DIVMTQSPDSLAVSLGERATINCKSSQSVLYSSNNKNYLAWYQQKPGQPPKLLIYWASTRESGVPDRFSGSGSGTDFTLTISSLQAEDVAVYYCQQYYSTPITFGGGTKVEIK

SEQ ID NO: 2591 - protein, 122 aa, synthetic construct
  source 1..122: note = ADI-27749 - Variable heavy (vh) domain
EVQLVESGGGLVKPGGSLRLSCAASGFTFSSYSMNWVRQAPGKGLEWVSSISSSSSYIYYADSVKGRFTISRDNAKNSLYLQMNSLRAEDTAVYYCARGAPMGAAAGWFDPWGQGTLVTVSS

SEQ ID NO: 2592 - protein, 107 aa, synthetic construct
  source 1..107: note = ADI-27749 - Variable light (vl) domain
DIQMTQSPSSVSASVGDRVTITCRASQGISSWLAWYQQKPGKAPKLLIYAASSLQSGVPSRFSGSGSGTDFTLTISSLQPEDFATYYCQQGVSFPRTFGGGTKVEIK

SEQ ID NO: 2593 - protein, 121 aa, synthetic construct
  source 1..121: note = ADI-27744 - Variable heavy (vh) domain
EVQLLESGGGLVQPGGSLRLSCAASGFTFSSYAMSWVRQAPGKGLEWVSAISGSGGSTYYADSVKGRFTISRDNSKNTLYLQMNSLRAEDTAVYYCAKDGGYYDSGAGDYWGQGTLVTVSS

SEQ ID NO: 2594 - protein, 107 aa, synthetic construct
  source 1..107: note = ADI-27744 - Variable light (vl) domain
DIQMTQSPSSVSASVGDRVTITCRASQGIDSWLAWYQQKPGKAPKLLIYAASSLQSGVPSRFSGSGSGTDFTLTISSLQPEDFATYYCQQGVSYPRTFGGGTKVEIK

SEQ ID NO: 2595 - protein, 121 aa, synthetic construct
  source 1..121: note = ADI-29443 - Variable heavy (vh) domain
QLQLQESGPGLVKPSETLSLTCTVSGGSISSSSYYWGWIRQPPGKGLEWIGSIYYSGSTYYNPSLKSRVTISVDTSKNQFSLKLSSVTAADTAVYYCARGSDRFHPYFDYWGQGTLVTVSS

SEQ ID NO: 2596 - protein, 107 aa, synthetic construct
  source 1..107: note = ADI-29443 - Variable light (vl) domain
EIVLTQSPATLSLSPGERATLSCRASQSVSRYLAWYQQKPGQAPRLLIYDASNRATGIPARFSGSGSGTDFTLTISSLEPEDFAVYYCQQFDTWPPTFGGGTKVEIK

SEQ ID NO: 2597 - protein, 125 aa, synthetic construct
  source 1..125: note = ADI-29378 - Variable heavy (vh) domain
QVQLVQSGAEVKKPGASVKVSCKASGYTFTSYYMHWVRQAPGQGLEWMGIINPSGGSTSYAQKFQGRVTMTRDTSTSTVYMELSSLRSEDTAVYYCAREGAGFAYGMDYYYMDVWGKGTTVTVSS

SEQ ID NO: 2598 - protein, 107 aa, synthetic construct
  source 1..107: note = ADI-29378 - Variable light (vl) domain
EIVLTQSPATLSLSPGERATLSCRASQSVSSYLAWYQQKPGQAPRLLIYDASNRATGIPARFSGSGSGTDFTLTISSLEPEDFAVYYCQQSDNWPFTFGGGTKVEIK

SEQ ID NO: 2599 - protein, 126 aa, synthetic construct
  source 1..126: note = ADI-29379 - Variable heavy (vh) domain
QVQLVQSGAEVKKPGASVKVSCKASGYTFTSYYMHWVRQAPGQGLEWMGIINPSGGSTSYAQKFQGRVTMTRDTSTSTVYMELSSLRSEDTAVYYCARGAPNYGDTTHDYYYMDVWGKGTTVTVSS

SEQ ID NO: 2600 - protein, 107 aa, synthetic construct
  source 1..107: note = ADI-29379 - Variable light (vl) domain
EIVMTQSPATLSVSPGERATLSCRASQSVSSNLAWYQQKPGQAPRLLIYGASTRATGIPARFSGSGSGTEFTLTISSLQSEDFAVYYCQQYDDWPFTFGGGTKVEIK

SEQ ID NO: 2601 - protein, 124 aa, synthetic construct
  source 1..124: note = ADI-29463 - Variable heavy (vh) domain
QVQLVQSGAEVKKPGASVKVSCKASGYTFTGYYMHWVRQAPGQGLEWMGWINPNSGGTNYAQKFQGRVTMTRDTSISTAYMELSRLRSDDTAVYYCARDTGEYYDTDDHGMDVWGQGTTVTVSS

SEQ ID NO: 2602 - protein, 107 aa, synthetic construct
  source 1..107: note = ADI-29463 - Variable light (vl) domain
EIVLTQSPGTLSLSPGERATLSCRASQSVSSNLAWYQQKPGQAPRLLIYGASTRATGIPARFSGSGSGTEFTLTISSLQSEDFAVYYCQQDDYWPPTFGGGTKVEIK

SEQ ID NO: 2603 - protein, 120 aa, synthetic construct; identical to SEQ ID NO: 2586
  source 1..120: note = mAb-C[NKG2D] - Variable heavy (vh) domain

SEQ ID NO: 2604 - protein, 5 aa, synthetic construct
  source 1..5: note = mAb-C[NKG2D] - vhCDR1
IYGVH

SEQ ID NO: 2605 - protein, 16 aa, synthetic construct
  source 1..16: note = mAb-C[NKG2D] - vhCDR2
VIWSGGSTDYNAKFQG

SEQ ID NO: 2606 - protein, 12 aa, synthetic construct
  source 1..12: note = mAb-C[NKG2D] - vhCDR3
KSHDGYYGVMDY

SEQ ID NO: 2607 - protein, 107 aa, synthetic construct; identical to SEQ ID NO: 2587
  source 1..107: note = mAb-C[NKG2D] - Variable light (vl) domain

SEQ ID NO: 2608 - protein, 11 aa, synthetic construct
  source 1..11: note = mAb-C[NKG2D] - vlCDR1
RASQSIGTSIH

SEQ ID NO: 2609 - protein, 7 aa, synthetic construct
  source 1..7: note = mAb-C[NKG2D] - vlCDR2
YASESIS

SEQ ID NO: 2610 - protein, 9 aa, synthetic construct
  source 1..9: note = mAb-C[NKG2D] - vlCDR3
QQSNTWPLT

SEQ ID NO: 2611 - protein, 122 aa, synthetic construct; identical to SEQ ID NO: 2573
  source 1..122: note = mAb-D[NKG2D] - Variable heavy (vh) domain

SEQ ID NO: 2612 - protein, 5 aa, synthetic construct
  source 1..5: note = mAb-D[NKG2D] - vhCDR1
NYWMH

SEQ ID NO: 2613 - protein, 16 aa, synthetic construct
  source 1..16: note = mAb-D[NKG2D] - vhCDR2
EIDPSDIYTNYAQKFQ

SEQ ID NO: 2614 - protein, 13 aa, synthetic construct
  source 1..13: note = mAb-D[NKG2D] - vhCDR3
GIYDGYYVYGMDY

SEQ ID NO: 2615 - protein, 107 aa, synthetic construct; identical to SEQ ID NO: 2574
  source 1..107: note = mAb-D[NKG2D] - Variable light (vl) domain

SEQ ID NO: 2616 - protein, 11 aa, synthetic construct
  source 1..11: note = mAb-D[NKG2D] - vlCDR1
RSSQDISNYLN

SEQ ID NO: 2617 - protein, 7 aa, synthetic construct
  source 1..7: note = mAb-D[NKG2D] - vlCDR2
YTSRLHS

SEQ ID NO: 2618 - protein, 9 aa, synthetic construct
  source 1..9: note = mAb-D[NKG2D] - vlCDR3
QQGKTLPRT

SEQ ID NO: 2619 - protein, 5 aa, synthetic construct
GSGGS

SEQ ID NO: 2620 - protein, 5 aa, synthetic construct
GGGGS

SEQ ID NO: 2621 - protein, 4 aa, synthetic construct
GGGS
